(19) United States
(12) Patent Application Publication
(10) Pub. No.: US 2019/0211361 A1
(43) Pub. Date: Jul. 11, 2019

(54) COMPOSITIONS COMPRISING CURONS AND USES THEREOF

(71) Applicant: FLAGSHIP PIONEERING INNOVATIONS V, INC., Cambridge, MA (US)

(72) Inventors: Avak Kahvejian, Lexington, MA (US); Erica Gabrielle Weinstein, Boston, MA (US); Nicholas McCartney Plugis, Boston, MA (US); Kevin James Lebo, Weymouth, MA (US); Fernando Martin Diaz, Boston, MA (US); Dhananjay Maniklal Nawandar, Brookline, MA (US)

(21) Appl. No.: 16/366,571

(22) Filed: Mar. 27, 2019

Related U.S. Application Data
(63) Continuation of application No. PCT/US2018/037379, filed on Jun. 13, 2018.
(60) Provisional application No. 62/676,730, filed on May 25, 2018.
(60) Provisional application No. 62/597,387, filed on Dec. 11, 2017.
(60) Provisional application No. 62/518,898, filed on Jun. 13, 2017.

(51) Int. Cl. C12N 15/86; C12N 15/113; C07K 14/005

(52) U.S. Cl. CPC C12N 15/86; C12N 15/113; C07K 14/005; C12N 2750/00022; C12N 2320/32; C12N 2750/00043; C12N 2310/141

(57) ABSTRACT

This invention relates generally to pharmaceutical compositions and preparations of curons and uses thereof.

### RELATED APPLICATIONS

[0001] This application is a Continuation of International Application No. PCT/US2018/037379, filed Jun. 13, 2018, which claims priority to U.S. Ser. No. 62/518,898 filed Jun. 13, 2017, U.S. Ser. No. 62/597,387 filed Dec. 11, 2017, and U.S. Ser. No. 62/676,730 filed May 25, 2018, each of which is incorporated herein by reference in its entirety.

### SEQUENCE LISTING

[0002] The instant application contains a Sequence Listing which has been submitted electronically in ASCII format and is hereby incorporated by reference in its entirety. Said ASCII copy, created on Jun. 13, 2018, is named V2057-7000WO_SL.txt and is 1,066,292 bytes in size.

### BACKGROUND

[0003] Existing viral systems for delivering therapeutic agents utilize viruses that can be associated with diseases or disorders, and can be highly immunogenic. There exists a need in the art for improved delivery vehicles that are substantially non-immunogenic and non-pathogenic.

### SUMMARY

[0004] The present disclosure provides a curon, e.g., a synthetic curon, that can be used as a delivery vehicle, e.g., for delivering a therapeutic agent to a eukaryotic cell. In some embodiments, a curon comprises a particle comprising a genetic element encapsulated in a proteinaceous exterior, which is capable of introducing the genetic element into a cell (e.g., a human cell). In some instances, the genetic element comprises a payload, e.g., it encodes an exogenous effector (e.g., a nucleic acid effector, such as a non-coding RNA, or a polypeptide effector, e.g., a protein) that is expressed in the cell. For example, the curon can deliver an exogenous effector into a cell by contacting the cell and introducing a genetic element encoding the exogenous effector into the cell, such that the exogenous effector is made or expressed by the cell. The exogenous effector can, in some instances, modulate a function of the cell or modulate an activity or level of a target molecule in the cell. For example, the exogenous effector may decrease viability of a cancer cell (e.g., as described in Example 22) or decrease levels of a target protein, e.g., interferon, in the cell (e.g., as described in Examples 3 and 4). In another example, the exogenous effector may be a protein expressed by the cell (e.g., as described in Example 9).

[0005] A synthetic curon has at least one structural difference compared to a wild-type virus, e.g., a deletion, insertion, substitution, enzymatic modification, relative to a wild-type virus. Generally, synthetic curons include an exogenous genetic element enclosed within a proteinaceous exterior, which can be used as substantially non-immunogenic vehicles for delivering the genetic element, or an effector (e.g., an exogenous effector or an endogenous effector) encoded therein (e.g., a polypeptide or nucleic acid effector), into eukaryotic cells. Curons can be used for treatment of diseases and disorders, e.g., by delivering a therapeutic agent to a desired cell or tissue. The genetic element of a synthetic curon of the present disclosure can be a circular single-stranded DNA molecule, and generally includes a protein binding sequence that binds to the proteinaceous exterior, or a polypeptide attached thereto, which may facilitate enclosure of the genetic element within the proteinaceous exterior and/or enrichment of the genetic element, relative to other nucleic acids, within the proteinaceous exterior.

[0006] In an aspect, the invention features a synthetic curon comprising (i) a genetic element comprising a promoter element, a sequence encoding an exogenous effector, (e.g., a payload), and a protein binding sequence (e.g., an exterior protein binding sequence, e.g., a packaging signal). In some embodiments, the genetic element is a single-stranded DNA. Alternatively or in combination, the genetic element has one or both of the following properties: is circular and/or integrates into the genome of a eukaryotic cell at a frequency of less than about 0.001%, 0.005%, 0.01%, 0.05%, 0.1%, 0.5%, 1%, 1.5%, or 2% of the genetic element that enters the cell; and (ii) a proteinaceous exterior. In some embodiments, the genetic element is enclosed within the proteinaceous exterior. In some embodiments, the synthetic curon is capable of delivering the genetic element into a eukaryotic cell.

[0007] In an aspect, the invention features a synthetic curon comprising: (i) a genetic element comprising a promoter element and a sequence encoding an exogenous effector (e.g., a payload), and a protein binding sequence (e.g., an exterior protein binding sequence); and (ii) a proteinaceous exterior; wherein the genetic element is enclosed within the proteinaceous exterior; and wherein the synthetic curon is capable of delivering the genetic element into a eukaryotic cell. In some embodiments, the genetic element comprises a nucleic acid sequence (e.g., a nucleic acid sequence of between 300-4000 nucleotides, e.g., between 300-3500 nucleotides, between 300-3000 nucleotides, between 300-2500 nucleotides, between 300-2000 nucleotides, between 300-1500 nucleotides) having at least 75% (e.g., at least 75, 76, 77, 78, 79, 80, 90, 91, 92, 93, 94, 95, 96, 97, 98, 99, or 100%) sequence identity to a sequence of a wild-type Anellovirus (e.g., a wild-type Torque Teno virus (TTV), Torque Teno mini virus (TTMV), or TTMDV sequence, e.g., a wild-type Anellovirus sequence as listed in any of Tables 1, 3, 5, 7, 9, 11, or 13). In some embodiments, the genetic element comprises a nucleic acid sequence (e.g., a nucleic acid sequence of at least 300 nucleotides, 500 nucleotides, 1000 nucleotides, 1500 nucleotides, 2000 nucleotides, 2500 nucleotides, 3000 nucleotides or more) having at least 75% (e.g., at least 75, 76, 77, 78, 79, 80, 90, 91, 92, 93, 94, 95, 96, 97, 98, 99, or 100%) sequence identity to a sequence of a wild-type Anellovirus (e.g., a wild-type Torque Teno virus (TTV), Torque Teno mini virus (TTMV), or TTMDV sequence, e.g., a wild-type Anellovirus sequence as listed in any of Tables 1, 3, 5, 7, 9, 11, or 13).

[0008] In an aspect, the invention features a method of treating a disease or disorder in a subject, the method comprising administering to the subject a curon, e.g., a synthetic curon, e.g., as described herein. In some embodiments, the curon comprises: (i) a genetic element comprising a promoter element and a sequence encoding an effector, e.g., a payload, and an exterior protein binding sequence. In some embodiments, the genetic element is a single-stranded DNA, and wherein the genetic element is circular and/or integrates at a frequency of less than about 0.001%, 0.005%, 0.01%, 0.05%, 0.1%, 0.5%, 1%, 1.5%, or 2% of the genetic element that enters the cell; and (ii) a proteinaceous exterior; wherein the genetic element is enclosed within the proteinaceous exterior; and wherein the curon is capable of delivering the genetic element into a eukaryotic cell.

[0009] In an aspect, the invention features a method of delivering a payload to a cell, tissue or subject, the method comprising administering to the subject a curon, e.g., a synthetic curon, e.g., as described herein, wherein the curon comprises a nucleic acid sequence encoding the payload. In some embodiments, the curon comprises: (i) a genetic element comprising a promoter element and a sequence encoding an effector, e.g., a payload, and an exterior protein binding sequence. In some embodiments, the genetic element is a single-stranded DNA, and wherein the genetic element is circular and/or integrates at a frequency of less than about 0.001%, 0.005%, 0.01%, 0.05%, 0.1%, 0.5%, 1%, 1.5%, or 2% of the genetic element that enters the cell; and (ii) a proteinaceous exterior; wherein the genetic element is enclosed within the proteinaceous exterior; and wherein the curon is capable of delivering the genetic element into a eukaryotic cell. In embodiments, the payload is a nucleic acid. In embodiments, the payload is a protein.

[0010] In an aspect, the invention features a method of delivering a synthetic curon to a cell, comprising contacting the synthetic curon described herein, e.g., of any of the aspects herein (e.g., the preceding aspects) with a cell, e.g., a eukaryotic cell, e.g., a mammalian cell.

[0011] In an aspect, the invention features a pharmaceutical composition comprising a curon (e.g., a synthetic curon) as described herein. In embodiments, the pharmaceutical composition further comprises a pharmaceutically acceptable carrier or excipient. In embodiments, the pharmaceutical composition comprises a dose comprising about 10⁵-10¹⁴ genome equivalents of the curon per kilogram.

[0012] In an aspect, the invention features a nucleic acid molecule comprising a genetic element comprising a promoter element and a sequence encoding an effector, e.g., a payload, and an exterior protein binding sequence. In embodiments, the genetic element is a single-stranded DNA, and wherein the genetic element is circular and/or integrates at a frequency of less than about 0.001%, 0.005%, 0.01%, 0.05%, 0.1%, 0.5%, 1%, 1.5%, or 2% of the genetic element that enters the cell. In embodiments, the effector does not originate from TTV and is not an SV40-miR-S1. In embodiments, the nucleic acid molecule does not comprise the polynucleotide sequence of TTMV-LY. In embodiments, the promoter element is capable of directing expression of the effector in a eukaryotic cell.

[0013] In an aspect, the invention features a genetic element comprising one, two, or three of: (i) a promoter element and a sequence encoding an effector, e.g., a payload; wherein the effector is exogenous relative to a wild-type Anellovirus sequence; (ii) at least 72 contiguous nucleotides (e.g., at least 72, 73, 74, 75, 76, 77, 78, 79, 80, 90, 100, or 150 nucleotides) having at least 75% (e.g., at least 75, 76, 77, 78, 79, 80, 90, 91, 92, 93, 94, 95, 96, 97, 98, 99, or 100%) sequence identity to a wild-type Anellovirus sequence; or at least 100 (e.g., at least 300, 500, 1000, 1500) contiguous nucleotides having at least 72% (e.g., at least 72, 73, 74, 75, 76, 77, 78, 79, 80, 90, 91, 92, 93, 94, 95, 96, 97, 98, 99, or 100%) sequence identity to a wild-type Anellovirus sequence; and (iii) a protein binding sequence, e.g., an exterior protein binding sequence, and wherein the nucleic acid construct is a single-stranded DNA; and wherein the nucleic acid construct is circular and/or integrates at a frequency of less than about 0.001%, 0.005%, 0.01%, 0.05%, 0.1%, 0.5%, 1%, 1.5%, or 2% of the genetic element that enters the cell.

[0014] In an aspect, the invention features a method of manufacturing a synthetic curon composition, comprising:

[0015] a) providing a host cell comprising, e.g., expressing one or more components (e.g., all of the components) of a curon, e.g., a synthetic curon, e.g., as described herein;

[0016] b) producing a preparation of curons from the host cell, wherein the synthetic curons of the preparation comprise a proteinaceous exterior and a genetic element comprising a promoter element, a sequence encoding an exogenous effector, (e.g., a payload), and a protein binding sequence (e.g., an exterior protein binding sequence, e.g., a packaging signal), thereby making a preparation of synthetic curon; and

[0017] c) formulating the preparation of synthetic curons, e.g., as a pharmaceutical composition suitable for administration to a subject.

[0018] In an aspect, the invention features a method of manufacturing a synthetic curon composition, comprising: a) providing a plurality of synthetic curon described herein, or a pharmaceutical composition described herein; and b) formulating the synthetic curons, e.g., as a pharmaceutical composition suitable for administration to a subject.

[0019] In an aspect, the invention features a method of making a host cell, e.g., a first host cell or a producer cell (e.g., as shown in FIG. 12), e.g., a population of first host cells, comprising a synthetic curon, the method comprising introducing a genetic element, e.g., as described herein, to a host cell and culturing the host cell under conditions suitable for production of the synthetic curon. In embodiments, the method further comprises introducing a helper, e.g., a helper virus, to the host cell. In embodiments, the introducing comprises transfection (e.g., chemical transfection) or electroporation of the host cell with the synthetic curon.

[0020] In an aspect, the invention features a method of making a synthetic curon, comprising providing a host cell, e.g., a first host cell or producer cell (e.g., as shown in FIG. 12), comprising a synthetic curon, e.g., as described herein, and purifying the curon from the host cell. In some embodiments, the method further comprises, prior to the providing step, contacting the host cell with a synthetic curon, e.g., as described herein, and incubating the host cell under conditions suitable for production of the synthetic curon. In embodiments, the host cell is the first host cell or producer cell described in the above method of making a host cell. In embodiments, purifying the curon from the host cell comprises lysing the host cell.

[0021] In some embodiments, the method further comprises a second step of contacting the synthetic curon produced by the first host cell or producer cell with a second host cell, e.g., a permissive cell (e.g., as shown in FIG. 12), e.g., a population of second host cells. In some embodiments, the method further comprises incubating the second host cell inder conditions suitable for production of the synthetic curon. In some embodiments, the method further comprises purifying a synthetic curon from the second host cell, e.g., thereby producing a curon seed population. In embodiments, at least about 2-100-fold more of the synthetic curon is produced from the population of second host cells than from the population of first host cells. In embodiments, purifying the curon from the second host cell comprises lysing the second host cell.

[0022] In some embodiments, the method further comprises a second step of contacting the synthetic curon produced by the second host cell with a third host cell, e.g., permissive cells (e.g., as shown in FIG. 12), e.g., a population of third host cells. In some embodiments, the method further comprises incubating the third host cell inder conditions suitable for production of the synthetic curon. In some embodiments, the method further comprises purifying a synthetic curon from the third host cell, e.g., thereby producing a curon stock population. In embodiments, purifying the curon from the third host cell comprises lysing the third host cell. In embodiments, at least about 2-100-fold more of the synthetic curon is produced from the population of third host cells than from the population of second host cells.

[0023] In some embodiments, the method further comprises evaluating one or more synthetic curons from the curon seed population or the curon stock population for one or more quality control parameters, e.g., purity, titer, potency (e.g., in genomic equivalents per curon particle), and/or the nucleic acid sequence, e.g., from the genetic element comprised by the synthetic curon. In some embodiments, the evaluated nucleic acid sequence comprises the nucleic acid sequence encoding an exogenous effector.

[0024] In an aspect, the invention comprises evaluating one or more synthetic curons, e.g., from a curon seed population or a curon stock population, for one or more quality control parameters, e.g., purity, titer, potency, and/or the nucleic acid sequence, e.g., from the genetic element comprised by the synthetic curon. In some embodiments, the evaluated nucleic acid sequence comprises the nucleic acid sequence encoding an exogenous effector.

[0025] In an aspect, the invention features a reaction mixture comprising a synthetic curon described herein and a helper virus, wherein the helper virus comprises a polynucleotide, e.g., a polynucleotide encoding an exterior protein, (e.g., an exterior protein capable of binding to the exterior protein binding sequence and, optionally, a lipid envelope), a polynucleotide encoding a replication protein (e.g., a polymerase), or any combination thereof.

[0026] In some embodiments, a curon (e.g., a synthetic curon) is isolated, e.g., isolated from a host cell and/or isolated from other constituents in a solution (e.g., a supernatant). In some embodiments, a curon (e.g., a synthetic curon) is purified, e.g., from a solution (e.g., a supernatant). In some embodiments, a curon is enriched in a solution relative to other constituents in the solution.

[0027] In some embodiments of any of the aforesaid curons, compositions or methods, the genetic element comprises a minimal curon genome, e.g., as identified according to the method described in Example 9. In some embodiments, the minimal curon genome comprises a minimal Anellovirus genome sufficient for replication of the curon (e.g., in a host cell). In embodiments, the minimal curon genome comprises a TTV-tth8 nucleic acid sequence, e.g., a TTV-tth8 nucleic acid sequence shown in Table 5, having deletions of at least 10%, 20%, 30%, 40%, 50%, 60%, 70%, 80%, 90%, 95%, 99%, or 100% of nucleotides 3436-3707 of the TTV-tth8 nucleic acid sequence. In embodiments, the minimal curon genome comprises a TTMV-LY2 nucleic acid sequence, e.g., a TTMV-LY2 nucleic acid sequence shown in Table 11, having deletions of at least 10%, 20%, 30%, 40%, 50%, 60%, 70%, 80%, 90%, 95%, 99%, or 100% of nucleotides 574-1371, 1432-2210, 574-2210, and/or 2610-2809 of the TTMV-LY2 nucleic acid sequence. In embodiments, the minimal curon genome is a minimal curon genome capable of self-replication and/or self-amplification. In embodiments, the minimal curon genome is a minimal curon genome capable of replicating or being amplified in the presence of a helper, e.g., a helper virus.

[0028] Additional features of any of the aforesaid curons, compositions or methods include one or more of the following enumerated embodiments.

[0029] Those skilled in the art will recognize, or be able to ascertain using no more than routine experimentation, many equivalents to the specific embodiments of the invention described herein. Such equivalents are intended to be encompassed by the following enumerated embodiments.

### ENUMERATED EMBODIMENTS

[0030] 1. A synthetic curon comprising:

[0031] (i) a genetic element comprising a promoter element, a nucleic acid sequence (e.g., a DNA sequence) encoding an exogenous effector, (e.g., a payload), and a protein binding sequence (e.g., an exterior protein binding sequence, e.g., a packaging signal), wherein the genetic element is a single-stranded DNA, and has one or both of the following properties: is circular and/or integrates into the genome of a eukaryotic cell at a frequency of less than about 0.001%, 0.005%, 0.01%, 0.05%, 0.1%, 0.5%, 1%, 1.5%, or 2% of the genetic element that enters the cell; and

[0032] (ii) a proteinaceous exterior;

[0033] wherein the genetic element is enclosed within the proteinaceous exterior; and

[0034] wherein the synthetic curon is capable of delivering the genetic element into a eukaryotic cell.

[0035] 2. A synthetic curon comprising:

[0036] (i) a genetic element comprising a promoter element and a nucleic acid sequence (e.g., a DNA sequence) encoding an exogenous effector (e.g., a payload), and a protein binding sequence (e.g., an exterior protein binding sequence),

[0037] wherein the genetic element has at least 75% (e.g., at least 75, 76, 77, 78, 79, 80, 85, 90, 91, 92, 93, 94, 95, 96, 97, 98, 99, or 100%) sequence identity to a wild-type Anellovirus sequence (e.g., a wild-type Torque Teno virus (TTV), Torque Teno mini virus (TTMV), or TTMDV sequence, e.g., a wild-type Anellovirus sequence, e.g., as listed in any of Tables 1, 3, 5, 7, 9, 11, or 13); and

[0038] (ii) a proteinaceous exterior;

[0039] wherein the genetic element is enclosed within the proteinaceous exterior; and

[0040] wherein the synthetic curon is capable of delivering the genetic element into a eukaryotic cell.

[0041] 3. A synthetic curon comprising:

[0042] (i) a genetic element comprising a promoter element and a nucleic acid sequence (e.g., a DNA sequence) encoding an effector (e.g., an exogenous effector or endogenous effector, e.g., endogenous miRNA), and a protein binding sequence (e.g., an exterior protein binding sequence),

[0043] wherein the genetic element has at least 75% (e.g., at least 75, 76, 77, 78, 79, 80, 85, 90, 91, 92, 93, 94, 95, 96, 97, 98, 99, or 100%) sequence identity to a wild-type Anellovirus sequence (e.g., a wild-type Torque Teno virus (TTV), Torque Teno mini virus (TTMV), or TTMDV sequence, e.g., a wild-type Anellovirus sequence, e.g., as listed in any of Tables 1, 3, 5, 7, 9, 11, or 13); and

[0044] wherein the genetic element is not a naturally occurring sequence (e.g., comprises a deletion, substitution, or insertion relative to a wild-type Anellovirus sequence (e.g., a wild-type Torque Teno virus (TTV), Torque Teno mini virus (TTMV), or TTMDV sequence, e.g., a wild-type Anellovirus sequence, e.g., as listed in any of Tables 1, 3, 5, 7, 9, 11, or 13);

[0045] (ii) a proteinaceous exterior;

[0046] wherein the genetic element is enclosed within the proteinaceous exterior; and

[0047] wherein the synthetic curon is capable of delivering the genetic element into a eukaryotic cell.

[0048] 4. A synthetic curon comprising:

[0049] (i) a genetic element comprising a promoter element and a nucleic acid sequence (e.g., a DNA sequence) encoding an exogenous effector (e.g., a payload), and a protein binding sequence (e.g., an exterior protein binding sequence),

[0050] wherein the protein binding sequence has at least 75% (e.g., at least 75, 76, 77, 78, 79, 80, 85, 90, 91, 92, 93, 94, 95, 96, 97, 98, 99, or 100%) sequence identity to the Consensus 5′ UTR sequence shown in Table 16-1, or to the Consensus GC-rich sequence shown in Table 16-2, or both of the Consensus 5′ UTR sequence shown in Table 16-1 and to the Consensus GC-rich sequence shown in Table 16-2; and

[0051] (ii) a proteinaceous exterior;

[0052] wherein the genetic element is enclosed within the proteinaceous exterior; and

[0053] wherein the synthetic curon is capable of delivering the genetic element into a eukaryotic cell.

[0054] 5. A synthetic curon comprising:

[0055] (i) a genetic element comprising a promoter element and a nucleic acid sequence encoding an exogenous effector, and a protein binding sequence, wherein the genetic element comprises one or both of:
[0056] (a) a sequence having at least 85% sequence identity to the Anellovirus 5′ UTR conserved domain nucleotide sequence of nucleotides 323-393 of the nucleic acid sequence of Table 11, or
[0057] (b) a sequence having at least 85% sequence identity to the Anellovirus GC-rich region of nucleotides 2868-2929 of the nucleic acid sequence of Table 11; and

[0058] (ii) a proteinaceous exterior; wherein the genetic element is enclosed within the proteinaceous exterior; and wherein the synthetic curon is capable of delivering the genetic element into a eukaryotic cell.

[0059] 6. A synthetic curon comprising:

[0060] (i) a genetic element comprising a promoter element and a nucleic acid sequence encoding an exogenous effector, and a protein binding sequence, wherein the genetic element comprises one or both of:
[0061] (a) a sequence having at least 85% sequence identity to the Anellovirus 5′ UTR conserved domain of the nucleic acid sequence of Table 1, 3, 5, 7, 9 or 13; or
[0062] (b) a sequence having at least 85% sequence identity to the Anellovirus GC-rich region of the nucleic acid sequence of of Table 1, 3, 5, 7, 9 or 13; and

[0063] (ii) a proteinaceous exterior; wherein the genetic element is enclosed within the proteinaceous exterior; and

[0064] wherein the synthetic curon is capable of delivering the genetic element into a eukaryotic cell.

[0065] 7. The synthetic curon of any of the preceding embodiments, wherein the promoter element comprises an RNA polymerase II-dependent promoter, an RNA polymerase III-dependent promoter, a PGK promoter, a CMV promoter, an EF-1α promoter, an SV40 promoter, a CAGG promoter, or a UBC promoter, TTV viral promoters, Tissue specific, U6 (pollIII), minimal CMV promoter with upstream DNA binding sites for activator proteins (TetR-VP16, Gal4-VP16, dCas9-VP16, etc).

[0066] 8. The synthetic curon of any of the preceding embodiments, wherein the promoter element comprises a TATA box.

[0067] 9. The synthetic curon of any of the preceding embodiments, wherein the promoter element is endogenous to a wild-type Anellovirus, e.g., a wild-type Anellovirus sequence as listed in any of Tables 1, 3, 5, 6, 9, 11, or 13.

[0068] 10. The synthetic curon of any of embodiments 1-8, wherein the promoter element is exogenous to wild-type Anellovirus.

[0069] 11. The synthetic curon of any of the preceding embodiments, wherein the exogenous effector encodes a therapeutic agent, e.g., a therapeutic peptide or polypeptide or a therapeutic nucleic acid.

[0070] 12. The synthetic curon of any of the preceding embodiments, wherein the exogenous effector comprises a regulatory nucleic acid, e.g., an miRNA, siRNA, mRNA, lncRNA, RNA, DNA, an antisense RNA, gRNA; a fluorescent tag or marker, an antigen, a peptide, a synthetic or analog peptide from a naturally-bioactive peptide, an agonist or antagonist peptide, an anti-microbial peptide, a pore-forming peptide, a bicyclic peptide, a targeting or cytotoxic peptide, a degradation or self-destruction peptide, a small molecule, an immune effector (e.g., influences susceptibility to an immune response/signal), a death protein (e.g., an inducer of apoptosis or necrosis), a non-lytic inhibitor of a tumor (e.g., an inhibitor of an oncoprotein), an epigenetic modifying agent, an epigenetic enzyme, a transcription factor, a DNA or protein modification enzyme, a DNA-intercalating agent, an efflux pump inhibitor, a nuclear receptor activator or inhibitor, a proteasome inhibitor, a competitive inhibitor for an enzyme, a protein synthesis effector or inhibitor, a nuclease, a protein fragment or domain, a ligand, an antibody, a receptor, or a CRISPR system or component.

[0071] 13. The synthetic curon of any of the preceding embodiments, wherein the exogenous effector comprises a miRNA.

[0072] 14. The synthetic curon of any of the preceding embodiments, wherein the effector, e.g., miRNA, targets a host gene, e.g., modulates expression of the gene, e.g., increases or decreases expression of the gene.

[0073] 15. The synthetic curon of any of the preceding embodiments, wherein the exogenous effector comprises an miRNA, and decreases expression of a host gene.

[0074] 16. The synthetic curon of any of the preceding embodiments, wherein the exogenous effector comprises a nucleic acid sequence about 20-200, 30-180, 40-160, 50-140, or 60-120 nucleotides in length.

[0075] 17. The synthetic curon of any of the preceding embodiments, wherein the nucleic acid sequence encoding the exogenous effector is about 20-200, 30-180, 40-160, 50-140, or 60-120 nucleotides in length.

[0076] 18. The synthetic curon of any of the preceding embodiments, wherein the sequence encoding the exogenous effector has a size of at least about 100 nucleotides.

[0077] 19. The synthetic curon of any of the preceding embodiments, wherein the sequence encoding the exogenous effector has a size of about 100 to about 5000 nucleotides.

[0078] 20. The synthetic curon of any of the preceding embodiments, wherein the sequence encoding the exogenous effector has a size of about 100-200, 200-300, 300-400, 400-500, 500-600, 600-700, 700-800, 800-900, 900-1000, 1000-1500, or 1500-2000 nucleotides.

[0079] 21. The synthetic curon of any of the preceding embodiments, wherein the sequence encoding the exogenous effector is situated at, within, or adjacent to (e.g., 5′ or 3′ to) one or more of the ORF1 locus (e.g., at the C-terminus of the ORF1 locus), the miRNA locus, the 5′ noncoding region upstream of the TATA box, the 5′ UTR, the 3′ noncoding region downstream of the poly-A region, or a noncoding region upstream of the GC-rich region of the genetic element.

[0080] 22. The synthetic curon of embodiment 21, wherein the sequence encoding the exogenous effector is located between the poly-A region and the GC-rich region of the genetic element.

[0081] 23. The synthetic curon of any of the preceding embodiments, which comprises (e.g., in the proteinaceous exterior) one or more of an amino acid sequence chosen from ORF2, ORF2/2, ORF2/3, ORF1, ORF1/1, or ORF1/2 of Table 12, or an amino acid sequence having at least 85% sequence identity thereto.

[0082] 24. The synthetic curon of any of the preceding embodiments, which comprises (e.g., in the proteinaceous exterior) one or more of an amino acid sequence chosen from ORF2, ORF2/2, ORF2/3, ORF2t/3, ORF1, ORF1/1, or ORF1/2 of any of Tables 2, 4, 6, 8, 10, or 14, or an amino acid sequence having at least 85% sequence identity thereto.

[0083] 25. The synthetic curon of any of the preceding embodiments, wherein the protein binding sequence comprises a nucleic acid sequence having at least 75% (e.g., at least 75, 76, 77, 78, 79, 80, 90, 91, 92, 93, 94, 95, 96, 97, 98, 99, or 100%) sequence identity to the 5′ UTR conserved domain or the GC-rich domain of a wild-type Anellovirus, e.g., a wild-type Anellovirus sequence as listed in any of Tables 1, 3, 5, 6, 9, 11, 13, A, or B.

[0084] 26. The synthetic curon of any of the preceding embodiments, wherein the genetic element, e.g., protein binding sequence of the genetic element, comprises least about 75% (e.g., at least 75%, 80%, 85%, 90%, 95%, 96%, 97%, 98%, 99%, or 100%) identity to the Consensus 5′ UTR nucleic acid sequence shown in Table 16-1.

[0085] 27. The synthetic curon of any of the preceding embodiments, wherein the genetic element, e.g., protein binding sequence of the genetic element, comprises least about 75% (e.g., at least 75%, 80%, 85%, 90%, 95%, 96%, 97%, 98%, 99%, or 100%) identity to the exemplary TTV 5′ UTR nucleic acid sequence shown in Table 16-1.

[0086] 28. The synthetic curon of any of the preceding embodiments, wherein the genetic element, e.g., protein binding sequence of the genetic element, comprises least about 75% (e.g., at least 75%, 80%, 85%, 90%, 95%, 96%, 97%, 98%, 99%, or 100%) identity to the TTV-CT30F 5′ UTR nucleic acid sequence shown in Table 16-1.

[0087] 29. The synthetic curon of any of the preceding embodiments, wherein the genetic element, e.g., protein binding sequence of the genetic element, comprises least about 75% (e.g., at least 75%, 80%, 85%, 90%, 95%, 96%, 97%, 98%, 99%, or 100%) identity to the TTV-HD23a 5′ UTR nucleic acid sequence shown in Table 16-1.

[0088] 30. The synthetic curon of any of the preceding embodiments, wherein the genetic element, e.g., protein binding sequence of the genetic element, comprises least about 75% (e.g., at least 75%, 80%, 85%, 90%, 95%, 96%, 97%, 98%, 99%, or 100%) identity to the TTV-JA20 5′ UTR nucleic acid sequence shown in Table 16-1.

[0089] 31. The synthetic curon of any of the preceding embodiments, wherein the genetic element, e.g., protein binding sequence of the genetic element, comprises least about 75% (e.g., at least 75%, 80%, 85%, 90%, 95%, 96%, 97%, 98%, 99%, or 100%) identity to the TTV-TJN02 5′ UTR nucleic acid sequence shown in Table 16-1.

[0090] 32. The synthetic curon of any of the preceding embodiments, wherein the genetic element, e.g., protein binding sequence of the genetic element, comprises least about 75% (e.g., at least 75%, 80%, 85%, 90%, 95%, 96%, 97%, 98%, 99%, or 100%) identity to the TTV-tth8 5′ UTR nucleic acid sequence shown in Table 16-1.

[0091] 33. The synthetic curon of any of the preceding embodiments, wherein the genetic element, e.g., protein binding sequence of the genetic element, comprises least about 75% (e.g., at least 75%, 80%, 85%, 90%, 95%, 96%, 97%, 98%, 99%, or 100%) identity to the Consensus GC-rich region shown in Table 16-2.

[0092] 34. The synthetic curon of any of the preceding embodiments, wherein the genetic element, e.g., protein binding sequence of the genetic element, comprises least about 75% (e.g., at least 75%, 80%, 85%, 90%, 95%, 96%, 97%, 98%, 99%, or 100%) identity to the exemplary TTV GC-rich region shown in Table 16-2.

[0093] 35. The synthetic curon of any of the preceding embodiments, wherein the genetic element, e.g., protein binding sequence of the genetic element, comprises least about 75% (e.g., at least 75%, 80%, 85%, 90%, 95%, 96%, 97%, 98%, 99%, or 100%) identity to the TTV-CT30F GC-rich region shown in Table 16-2.

[0094] 36. The synthetic curon of any of the preceding embodiments, wherein the genetic element, e.g., protein binding sequence of the genetic element, comprises least about 75% (e.g., at least 75%, 80%, 85%, 90%, 95%, 96%, 97%, 98%, 99%, or 100%) identity to the TTV-HD23a GC-rich region shown in Table 16-2.

[0095] 37. The synthetic curon of any of the preceding embodiments, wherein the genetic element, e.g., protein binding sequence of the genetic element, comprises least about 75% (e.g., at least 75%, 80%, 85%, 90%, 95%, 96%, 97%, 98%, 99%, or 100%) identity to the TTV-JA20 GC-rich region shown in Table 16-2.

[0096] 38. The synthetic curon of any of the preceding embodiments, wherein the genetic element, e.g., protein binding sequence of the genetic element, comprises least about 75% (e.g., at least 75%, 80%, 85%, 90%, 95%, 96%, 97%, 98%, 99%, or 100%) identity to the TTV-TJN02 GC-rich region shown in Table 16-2.

[0097] 39. The synthetic curon of any of the preceding embodiments, wherein the genetic element, e.g., protein binding sequence of the genetic element, comprises least about 75% (e.g., at least 75%, 80%, 85%, 90%, 95%, 96%, 97%, 98%, 99%, or 100%) identity to the TTV-tth8 GC-rich region shown in Table 16-2.

[0098] 40. The synthetic curon of any of the preceding embodiments, wherein at least 60% (e.g., at least 60%, 65%, 70%, 75%, 80%, 85%, 90%, 95%, or 100%) of the protein binding sequence consists of G or C.

[0099] 41. The synthetic curon of any of the preceding embodiments, wherein the genetic element comprises a sequence of at least 80, 90, 100, 110, 120, 130, or 140 nucleotides in length, which consists of G or C at at least 70% (e.g., at least 70%, 75%, 80%, 85%, 90%, 95%, 96%, 97%, 98%, 99%, or 100%) or about 70-100%, 75-95%, 80-95%, 85-95%, or 85-90% of the positions.

[0100] 42. The synthetic curon of any of the preceding embodiments, wherein the genetic element comprises a sequence having at least 85% sequence identity to the Anellovirus 5′ UTR conserved domain nucleotide sequence of nucleotides 1-393 of the nucleic acid sequence of Table 11 and a sequence having at least 85% sequence identity to the Anellovirus GC-rich region of nucleotides 2868-2929 of the nucleic acid sequence of Table 11.

[0101] 43. The synthetic curon of any of the preceding embodiments, wherein the protein binding sequence is capable of binding to an exterior protein, e.g., a capsid protein, e.g., an Anellovirus capsid protein, e.g., a capsid protein comprising an amino acid sequence having at least 75% (e.g., at least 75, 76, 77, 78, 79, 80, 90, 91, 92, 93, 94, 95, 96, 97, 98, 99, or 100%) sequence identity to any of the sequences listed in Table 1-14, 16, or 18.

[0102] 44. The synthetic curon of any of the preceding embodiments, wherein the genetic element comprises at least 75% identity to the nucleotide sequence of Table 11.

[0103] 45. The synthetic curon of any of the preceding embodiments, wherein the protein binding sequence binds an arginine-rich region of the proteinaceous exterior.

[0104] 46. The synthetic curon of any of the preceding embodiments, wherein the proteinaceous exterior comprises an exterior protein capable of specifically binding to the protein binding sequence.

[0105] 47. The synthetic curon of embodiment 46, wherein the exterior protein comprises a capsid protein e.g., an Anellovirus capsid protein, e.g., a capsid protein comprising an amino acid sequence having at least 75% (e.g., at least 75, 76, 77, 78, 79, 80, 90, 91, 92, 93, 94, 95, 96, 97, 98, 99, or 100%) sequence identity to any of the sequences listed in any of Tables 1-14, 16, or 18 or an amino acid sequence encoded by any of the sequences listed in Table 1-14, 15, 17, or 19, or a fragment thereof.

[0106] 48. The synthetic curon of any of the preceding embodiments, wherein the proteinaceous exterior comprises one or more of the following: one or more glycosylated proteins, a hydrophilic DNA-binding region, an arginine-rich region, a threonine-rich region, a glutamine-rich region, a N-terminal polyarginine sequence, a variable region, a C-terminal polyglutamine/glutamate sequence, and one or more disulfide bridges.

[0107] 49. The synthetic curon of any of the preceding embodiments, wherein the proteinaceous exterior comprises one or more of the following characteristics: an icosahedral symmetry, recognizes and/or binds a molecule that interacts with one or more host cell molecules to mediate entry into the host cell, lacks lipid molecules, lacks carbohydrates, is pH and temperature stable, is detergent resistant, and is substantially non-immunogenic or substantially non-pathogenic in a host.

[0108] 50. The synthetic curon of any of the preceding embodiments, wherein the proteinaceous exterior comprises at least one functional domain that provides one or more functions, e.g., species and/or tissue and/or cell selectivity, genetic element binding and/or packaging, immune evasion (substantial non-immunogenicity and/or tolerance), pharmacokinetics, endocytosis and/or cell attachment, nuclear entry, intracellular modulation and localization, exocytosis modulation, propagation, and nucleic acid protection.

[0109] 51. The synthetic curon of any of the preceding embodiments, wherein the portions of the genetic element excluding the effector have a combined size of about 2.5-5 kb (e.g., about 2.8-4 kb, about 2.8-3.2 kb, about 3.6-3.9 kb, or about 2.8-2.9 kb), less than about 5 kb (e.g., less than about 2.9 kb, 3.2 kb, 3.6 kb, 3.9 kb, or 4 kb), or at least 100 nucleotides (e.g., at least 1 kb).

[0110] 52. The synthetic curon of any of the preceding embodiments, wherein the genetic element is single-stranded.

[0111] 53. The synthetic curon of any of the preceding embodiments, wherein the genetic element is circular.

[0112] 54. The synthetic curon of any of the preceding embodiments, wherein the genetic element is DNA.

[0113] 55. The synthetic curon of any of the preceding embodiments, wherein the genetic element is a negative strand DNA.

[0114] 56. The synthetic curon of any of the preceding embodiments, wherein the genetic element comprises an episome.

[0115] 57. The synthetic curon of any of the preceding embodiments, wherein the synthetic curon has a lipid content of less than 10%, 5%, 2%, or 1% by weight, e.g., does not comprise a lipid bilayer.

[0116] 58. The synthetic curon of any of the preceding embodiments, wherein the synthetic curon is resistant to degradation by a detergent (e.g., a mild detergent, e.g., a biliary salt, e.g., sodium deoxycholate) relative to a viral particle comprising an external lipid bilayer, e.g., a retrovirus.

[0117] 59. The synthetic curon of embodiment 58, wherein at least about 50% (e.g., at least about 50%, 60%, 70%, 80%, 85%, 90%, 95%, 96%, 97%, 98%, 99%, 99.5%, or 99.9%) of the synthetic curon is not degraded after incubation the detergent (e.g., 0.5% by weight of the detergent) for 30 minutes at 37° C.

[0118] 60. The synthetic curon of any of the preceding embodiments, wherein the genetic element has at least 75% (e.g., at least 75, 76, 77, 78, 79, 80, 90, 91, 92, 93, 94, 95, 96, 97, 98, 99, or 100%) sequence identity to a wild-type Circoviridae sequence or a wild-type Anellovirus sequence, e.g., a wild-type Torque Teno virus (TTV), Torque Teno mini virus (TTMV), or TTMDV sequence, e.g., a sequence as listed in any of Tables 1, 3, 5, 7, 9, 11, or 13.

[0119] 61. The synthetic curon of embodiment 60, wherein the genetic element comprises a deletion of at least one element, e.g., an element as listed in any of Tables 1, 3, 5, 7, 9, 11, or 13, relative to a wild-type Anellovirus sequence, e.g., a wild-type TTV sequence or a wild-type TTMV sequence.

[0120] 62. The synthetic curon of embodiment 61, wherein the genetic element comprises a deletion comprising a nucleic acid sequence corresponding to nucleotides 3436-3607 of a TTV-tth8 sequence, e.g., the nucleic acid sequence shown in Table 5.

[0121] 63. The synthetic curon of embodiment 61, wherein the genetic element comprises a deletion comprising a nucleic acid sequence corresponding to nucleotides 574-1371 and/or nucleotides 1432-2210 of a TTMV-LY2 sequence, e.g., the nucleic acid sequence shown in Table 11.

[0122] 64. The synthetic curon of embodiment 61 or 62, wherein the genetic element comprises a deletion comprising a nucleic acid sequence corresponding to nucleotides 1372-1431 of a TTMV-LY2 sequence, e.g., the nucleic acid sequence shown in Table 11.

[0123] 65. The synthetic curon of embodiment 61, 63, or 64, wherein the genetic element comprises a deletion comprising a nucleic acid sequence corresponding to nucleotides 2610-2809 of a TTMV-LY2 sequence, e.g., the nucleic acid sequence shown in Table 11.

[0124] 66. The synthetic curon of any of the preceding embodiments, wherein the genetic element comprises at least 72 nucleotides (e.g., at least 73, 74, 75, etc. nt, optionally less than the full length of the genome) of a wild-type Anellovirus sequence, e.g., a wild-type Torque Teno virus (TTV), Torque Teno mini virus (TTMV), or TTMDV sequence, e.g., a sequence as listed in any of Tables 1, 3, 5, 7, 9, 11, or 13.

[0125] 67. The synthetic curon of any of the preceding embodiments, wherein the genetic element further comprises one or more of the following sequences: a sequence that encodes one or more miRNAs, a sequence that encodes one or more replication proteins, a sequence that encodes an exogenous gene, a sequence that encodes a therapeutic, a regulatory sequence (e.g., a promoter, enhancer), a sequence that encodes one or more regulatory sequences that targets endogenous genes (siRNA, lncRNAs, shRNA), a sequence that encodes a therapeutic mRNA or protein, and a sequence that encodes a cytolytic/cytotoxic RNA or protein.

[0126] 68. The synthetic curon of any of the preceding embodiments, wherein the synthetic curon further comprises a second genetic element, e.g., a second genetic element enclosed within the proteinaceous exterior.

[0127] 69. The synthetic curon of embodiment 68, wherein the second genetic element comprises a protein binding sequence, e.g., an exterior protein binding sequence, e.g., a packaging signal, e.g., a 5′ UTR conserved domain or GC-rich region, e.g., as described herein.

[0128] 70. The synthetic curon of any of the preceding embodiments, wherein the synthetic curon does not detectably infect bacterial cells, e.g., infects less than 1%, 0.5%, 0.1%, or 0.01% of bacterial cells.

[0129] 71. The synthetic curon of any of the preceding embodiments, wherein the synthetic curon is capable of infecting mammalian cells, e.g., human cells, e g, immune cells, liver cells, epithelial cells, e.g., in vitro.

[0130] 72. The synthetic curon of any of the preceding embodiments, wherein the genetic element integrates at a frequency of less than 10%, 8%, 6%, 4%, 3%, 2%, 1%, 0.5%, 0.2%, 0.1% of the curons that enters the cell, e.g., wherein the synthetic curon is non-integrating.

[0131] 73. The synthetic curon of any of the preceding embodiments, wherein the genetic element is capable of replicating, e.g., capable of generating at least 10², 2×10², 5×10,10³, 2×10³, 5×10³, or 10⁴ genomic equivalents of the genetic element per cell, e.g., as measured by a quantitative PCR assay.

[0132] 74. The synthetic curon of any of the preceding embodiments, wherein the genetic element is capable of replicating, e.g., capable of generating at least 10², 2×10², 5×10,10³, 2×10³, 5×10³, or 10⁴ more genomic equivalents of the genetic element in a cell, e.g., as measured by a quantitative PCR assay, than were present in the synthetic curon prior to delivery of the genetic element into the cell.

[0133] 75. The synthetic curon of any of the preceding embodiments, wherein the genetic element is not capable of replicating, e.g., wherein the genetic element is altered at a replication origin or lacks a replication origin.

[0134] 76. The synthetic curon of any of the preceding embodiments, wherein the genetic element is not capable of self-replicating, e.g., capable of being replicated without being integrated into a host cell genome.

[0135] 77. The synthetic curon of any of the preceding embodiments, wherein the synthetic curon is substantially non-pathogenic, e.g., does not induce a detectable deleterious symptom in a subject (e.g., elevated cell death or toxicity, e.g., relative to a subject not exposed to the curon).

[0136] 78. The synthetic curon of any of the preceding embodiments, wherein the synthetic curon is substantially non-immunogenic, e.g., does not induce a detectable and/or unwanted immune response, e.g., as detected according to the method described in Example 4.

[0137] 79. The synthetic curon of embodiment 78, wherein the substantially non-immunogenic curon has an efficacy in a subject that is a least about 10%, 20%, 30%, 40%, 50%, 60%, 70%, 80%, 90%, 95%, or 100% of the efficacy in a reference subject lacking an immune response.

[0138] 80. The synthetic curon of embodiment 78 or 79, wherein the immune response comprises one or more of an antibody specific to the curon; a cellular response (e.g., an immune effector cell (e.g., T cell- or NK cell) response) against the curon or cells comprising the curon; or macrophage engulfment of the curon or cells comprising the curon.

[0139] 81. The synthetic curon of any of the preceding embodiments, wherein the synthetic curon is less immunogenic than an AAV, elicits an immune response below that detected for a comparable quantity of AAV, e.g., as measured by an assay described herein, induces an antibody prevalence of less than 70% (e.g., less than about 60%, 50%, 40%, 30%, 20%, or 10% antibody prevalence) as measured by an assay described herein, or is substantially non-immunogenic.

[0140] 82. The synthetic curon of any of the preceding embodiments, wherein a population of at least 1000 of the synthetic curons is capable of delivering at least 100 copies of the genetic element into one or more of the eukaryotic cells.

[0141] 83. The synthetic curon of any of the preceding embodiments, wherein a population of the synthetic curons is capable of delivering the genetic element into at least 10%, 20%, 30%, 40%, 50%, 60%, 70%, 80%, 90%, 95%, 99%, or more of a population of the eukaryotic cells.

[0142] 84. The synthetic curon of any of the preceding embodiments, wherein a population of the synthetic curons is capable of delivering at least 1, 2, 5, 10, 20, 50, 100, 200, 500, 1000, 2000, 5000, 8,000, 1×10⁴, 1×10⁵, 1×10⁶, 1×10⁷ or greater copies of the genetic element per cell to a population of the eukaryotic cells.

[0143] 85. The synthetic curon of any of the preceding embodiments, wherein a population of the synthetic curons is capable of delivering 1×10⁴-1×10⁵, 1×10⁴-1×10⁶, 1×10⁴-1×10⁷, 1×10⁵-1×10⁶, 1×10⁵-1×10⁷, or 1×10⁶-1×10⁷ copies of the genetic element per cell to a population of the eukaryotic cells.

[0144] 86. The synthetic curon of any of the preceding embodiments, wherein the synthetic curon is present after at least two passages.

[0145] 87. The synthetic curon of any of the preceding embodiments, wherein the synthetic curon was produced by a process comprising at least two passages.

[0146] 88. The synthetic curon of any of the preceding embodiments, wherein the synthetic curon selectively delivers the exogenous effector to a desired cell type, tissue, or organ (e.g., photoreceptors in the retina, epithelial linings, or pancreas).

[0147] 89. The synthetic curon of any of the preceding embodiments, wherein the synthetic curon shows greater selectivity in vitro for an embryonic kidney cell line (e.g., HEK293T) than a lung epithelial carcinoma cell line (e.g., A549).

[0148] 90. The synthetic curon of any of the preceding embodiments, wherein the synthetic curon is present at higher levels in (e.g., preferentially accumulates in) a desired organ or tissue relative to other organs or tissues.

[0149] 91. The synthetic curon of embodiment 90, wherein the desired organ or tissue comprises bone marrow, blood, heart, GI, or skin.

[0150] 92. The synthetic curon of any of the preceding embodiments, wherein the eukaryotic cell is a mammalian cell, e.g., a human cell.

[0151] 93. The synthetic curon of any of the preceding embodiments, wherein the synthetic curon, or copies thereof, are detectable in a cell 24 hours (e.g., 1 day, 2 days, 3 days, 4 days, 5 days, 6 days, 1 week, 2 weeks, 3 weeks, 4 weeks, 30 days, or 1 month) after delivery into the cell.

[0152] 94. The synthetic curon of any of the preceding embodiments, wherein the synthetic curon is produced in the cell pellet and the supernatant at at least about 10⁸-fold (e.g., about 10⁵-fold, 10⁶-fold, 10⁷-fold, 10⁸-fold, 10⁹-fold, or 10¹⁰-fold) genomic equivalents/mL, e.g., relative to the quantity of the synthetic curon used to infect the cells, after 3-4 days post infection, e.g., using an infectivity assay, e.g., an assay according to Example 7.

[0153] 95. A composition comprising the synthetic curon of any of the preceding embodiments.

[0154] 96. A pharmaceutical composition comprising the synthetic curon of any of the preceding embodiments, and a pharmaceutically acceptable carrier or excipient.

[0155] 97. The composition or pharmaceutical composition of embodiment 95 or 96, which comprises at least 50%, 60%, 70%, 80%, 90%, 95%, 96%, 97%, 98%, 99%, or more curons, e.g., synthetic curons.

[0156] 98. The composition or pharmaceutical composition of any of embodiments 95-97, which comprises at least 10³, 10⁴, 10⁵, 10⁶, 10⁷, 10⁸, or 10⁹ synthetic curons.

[0157] 99. A pharmaceutical composition comprising
[0158] a) at least 10³, 10⁴, 10⁵, 10⁶, 10⁷, 10⁸, or 10⁹ curons (e.g., synthetic curons described herein) comprising:
   [0159] (i) a genetic element described herein, e.g., a genetic element comprising a promoter element, a nucleic acid sequence (e.g., a DNA sequence) encoding an exogenous effector, (e.g., a payload), and a protein binding sequence (e.g., an exterior protein binding sequence, e.g., a packaging signal), wherein the genetic element is a single-stranded DNA, and has one or both of the following properties: is circular and/or integrates into the genome of a eukaryotic cell at a frequency of less than about 0.001%, 0.005%, 0.01%, 0.05%, 0.1%, 0.5%, 1%, 1.5%, or 2% of the genetic element that enters the cell; and
   [0160] (ii) a proteinaceous exterior,
   [0161] wherein the genetic element is enclosed within the proteinaceous exterior; and
   [0162] wherein the synthetic curon is capable of delivering the genetic element into a eukaryotic cell;
[0163] b) a pharmaceutical excipient, and, optionally,
[0164] c) less than a pre-determined amount of: mycoplasma, endotoxin, host cell nucleic acids (e.g., host cell DNA and/or host cell RNA), animal-derived process impurities (e.g., serum albumin or trypsin), replication-competent agents (RCA), e.g., replication-competent virus or unwanted curons, free viral capsid protein, adventitious agents, and/or aggregates.

[0165] 100. A pharmaceutical composition comprising
[0166] a) at least 10³, 10⁴, 10⁵, 10⁶, 10⁷, 10⁸, or 10⁹ curons (e.g., synthetic curons described herein) comprising:
   [0167] (i) a genetic element described herein, e.g., a genetic element comprising a promoter element and a nucleic acid sequence (e.g., a DNA sequence) encoding an exogenous effector (e.g., a payload), and a protein binding sequence (e.g., an exterior protein binding sequence),
   [0168] wherein the genetic element has at least 75% (e.g., at least 75, 76, 77, 78, 79, 80, 90, 91, 92, 93, 94, 95, 96, 97, 98, 99, or 100%) sequence identity to a wild-type Anellovirus sequence (e.g., a wild-type Torque Teno virus (TTV), Torque Teno mini virus (TTMV), or TTMDV sequence, e.g., a wild-type Anellovirus sequence, e.g., as listed in any of Tables 1, 3, 5, 7, 9, 11, or 13); and
   [0169] (ii) a proteinaceous exterior;
   [0170] wherein the genetic element is enclosed within the proteinaceous exterior; and
   [0171] wherein the synthetic curon is capable of delivering the genetic element into a eukaryotic cell
[0172] b) a pharmaceutical excipient, and, optionally,
[0173] c) less than a pre-determined amount of: mycoplasma, endotoxin, host cell nucleic acids (e.g., host cell DNA and/or host cell RNA), animal-derived process impurities (e.g., serum albumin or trypsin), replication-competent agents (RCA), e.g., replication-competent virus or unwanted curons, free viral capsid protein, adventitious agents, and/or aggregates.

[0174] 101. The composition or pharmaceutical composition of any of embodiments 95-100, having one or more of the following characteristics:

[0175] a) the pharmaceutical composition meets a pharmaceutical or good manufacturing practices (GMP) standard;

[0176] b) the pharmaceutical composition was made according to good manufacturing practices (GMP);

[0177] c) the pharmaceutical composition has a pathogen level below a predetermined reference value, e.g., is substantially free of pathogens;

[0178] d) the pharmaceutical composition has a contaminant level below a predetermined reference value, e.g., is substantially free of contaminants;

[0179] e) the pharmaceutical composition has a predetermined level of non-infectious particles or a predetermined ratio of particles:infectious units (e.g., <300:1, ≤200:1, ≤100:1, or <50:1), or

[0180] f) the pharmaceutical composition has low immunogenicity or is substantially non-immunogenic, e.g., as described herein.

[0181] 102. The composition or pharmaceutical composition of any of embodiments 95-101, wherein the pharmaceutical composition has a contaminant level below a predetermined reference value, e.g., is substantially free of contaminants.

[0182] 103. The composition or pharmaceutical composition of embodiment 102, wherein the contaminant is selected from the group consisting of: mycoplasma, endotoxin, host cell nucleic acids (e.g., host cell DNA and/or host cell RNA), animal-derived process impurities (e.g., serum albumin or trypsin), replication-competent agents (RCA), e.g., replication-competent virus or unwanted curons (e.g., a curon other than the desired curon, e.g., a synthetic curon as described herein), free viral capsid protein, adventitious agents, and aggregates.

[0183] 104. The composition or pharmaceutical composition of embodiment 103, wherein the contaminant is host cell DNA and the threshold amount is about 500 ng of host cell DNA per dose of the pharmaceutical composition.

[0184] 105. The composition or pharmaceutical composition of any of embodiments 95-104, wherein the pharmaceutical composition comprises less than 10% (e.g., less than about 10%, 5%, 4%, 3%, 2%, 1%, 0.5%, or 0.1%) contaminant by weight.

[0185] 106. Use of the synthetic curon, composition, or pharmaceutical composition of any of the preceding embodiments for treating a disease or disorder in a subject.

[0186] 107. The use of embodiment 106, wherein the disease or disorder is chosen from an immune disorder, an interferonopathy (e.g., Type I interferonopathy), infectious disease, inflammatory disorder, autoimmune condition, cancer (e.g., a solid tumor, e.g., lung cancer), and a gastrointestinal disorder.

[0187] 108. The synthetic curon, composition, or pharmaceutical composition of any of the preceding embodiments for use in treating a disease or disorder in a subject.

[0188] 109. A method of treating a disease or disorder in a subject, the method comprising administering a synthetic curon of any of the preceding embodiments or the pharmaceutical composition of any of embodiments 95-105 to the subject.

[0189] 110. The method of embodiment 109, wherein the disease or disorder is chosen from an immune disorder, an interferonopathy (e.g., Type I interferonopathy), infectious disease, inflammatory disorder, autoimmune condition, cancer (e.g., a solid tumor, e.g., lung cancer), and a gastrointestinal disorder.

[0190] 111. A method of modulating, e.g., enhancing, a biological function in a subject, the method comprising administering a synthetic curon of any of the preceding embodiments or the pharmaceutical composition of any of embodiments 95-105 to the subject.

[0191] 112. A method of treating a disease or disorder in a subject, the method comprising administering to the subject a curon, e.g., synthetic curon, comprising:

[0192] (i) a genetic element comprising a promoter element and a sequence encoding an effector, e.g., a payload, and an exterior protein binding sequence;

[0193] wherein the genetic element is a single-stranded DNA, and wherein the genetic element is circular and/or integrates at a frequency of less than about 0.001%, 0.005%, 0.01%, 0.05%, 0.1%, 0.5%, 1%, 1.5%, or 2% of the genetic element that enters a cell; and

[0194] (ii) a proteinaceous exterior;

[0195] wherein the genetic element is enclosed within the proteinaceous exterior; and

[0196] wherein the curon, e.g., synthetic curon, is capable of delivering the genetic element into a eukaryotic cell.

[0197] 113. The method of embodiment 112, wherein the disease or disorder is chosen from an immune disorder, an interferonopathy (e.g., Type I interferonopathy), infectious disease, inflammatory disorder, autoimmune condition, cancer (e.g., a solid tumor, e.g., lung cancer), and a gastrointestinal disorder.

[0198] 114. The method of any of embodiments 109-113, wherein the effector is not an SV40-miR-S1, e.g., wherein the effector is a protein-encoding payload.

[0199] 115. The method of any of embodiments 109-114, wherein the curon does not comprise an exogenous effector.

[0200] 116. The method of any of embodiments 109-115, wherein the curon comprises a wild-type Circovirus or a wild-type Anellovirus, e.g., TTV or TTMV.

[0201] 117. The method of any of embodiments 109-116, wherein the administration of the curon, e.g., synthetic curon, results in delivery of the genetic element into at least 10%, 20%, 30%, 40%, 50%, 60%, 70%, 80%, 90%, 95%, 99%, or more of a population of target cells in the subject.

[0202] 118. The method of any of embodiments 109-117, wherein the administration of the curon, e.g., synthetic curon, results in delivery of the exogenous effector into at least 10%, 20%, 30%, 40%, 50%, 60%, 70%, 80%, 90%, 95%, 99%, or more of a population of target cells in the subject.

[0203] 119. The method of embodiment 117 or 118, wherein the target cells comprise mammalian cells, e.g., human cells, e.g., immune cells, liver cells, lung epithelial cells, e.g., in vitro.

[0204] 120. The method of any of embodiments 117-119, wherein the target cells are present in the liver or lung.

[0205] 121. The method of any of embodiments 117-120, wherein the target cells into which the genetic element is delivered each receive at least 10, 50, 100, 500, 1000, 10,000, 50,000, 100,000, or more copies of the genetic element.

[0206] 122. The method of any of embodiments 109-121, wherein the effector comprises a miRNA and wherein the miRNA reduces the level of a target protein or RNA in a cell or in a population of cells, e.g., into which the curon is delivered, e.g., by at least 10%, 20%, 30%, 40%, or 50%.

[0207] 123. A method of delivering a synthetic curon to a cell, comprising contacting the synthetic curon of any of the preceding embodiments with a cell, e.g., a eukaryotic cell, e.g., a mammalian cell.

[0208] 124. The method of embodiment 123, further comprising contacting a helper virus with the cell, wherein the helper virus comprises a polynucleotide, e.g., a polynucleotide encoding an exterior protein, e.g., an exterior protein capable of binding to the exterior protein binding sequence and, optionally, a lipid envelope.

[0209] 125. The method of embodiment 124, wherein the helper virus is contacted with the cell prior to, concurrently with, or after contacting the synthetic curon with the cell.

[0210] 126. The method of embodiment 123, further comprising contacting a helper polynucleotide with the cell.

[0211] 127. The method of embodiment 126, wherein the helper polynucleotide comprises a sequence polynucleotide encoding an exterior protein, e.g., an exterior protein capable of binding to the exterior protein binding sequence and a lipid envelope.

[0212] 128. The method of embodiment 126, wherein the helper polynucleotide is an RNA (e.g., mRNA), DNA, plasmid, viral polynucleotide, or any combination thereof.

[0213] 129. The method of any of embodiments 126-128, wherein the helper polynucleotide is contacted with the cell prior to, concurrently with, or after contacting the synthetic curon with the cell.

[0214] 130. The method of any of embodiments 123-129, further comprising contacting a helper protein with the cell.

[0215] 131. The method of embodiment 130, wherein the helper protein comprises a viral replication protein or a capsid protein.

[0216] 132. A host cell comprising the synthetic curon of any of the preceding embodiments.

[0217] 133. A nucleic acid molecule comprising a promoter element, a sequence encoding an effector (e.g., a payload), and an exterior protein binding sequence,

[0218] wherein the nucleic acid molecule is a single-stranded DNA, and wherein the nucleic acid molecule is circular and/or integrates at a frequency of less than about 0.001%, 0.005%, 0.01%, 0.05%, 0.1%, 0.5%, 1%, 1.5%, or 2% of the nucleic acid molecule that enters a cell;

[0219] wherein the effector does not originate from TTV and is not an SV40-miR-S1;

[0220] wherein the nucleic acid molecule does not comprise the polynucleotide sequence of TTMV-LY;

[0221] wherein the promoter element is capable of directing expression of the effector in a eukaryotic cell.

[0222] 134. A nucleic acid molecule comprising a promoter element and a nucleic acid sequence encoding an exogenous effector, and a protein binding sequence, wherein the genetic element comprises one or both of:
[0223] (a) a sequence having at least 85% sequence identity to the Anellovirus 5′ UTR conserved domain nucleotide sequence of nucleotides 323-393 of the nucleic acid sequence of Table 11, or
[0224] (b) a sequence having at least 85% sequence identity to the Anellovirus GC-rich region of nucleotides 2868-2929 of the nucleic acid sequence of Table 11.

[0225] 135. A nucleic acid molecule comprising a promoter element and a nucleic acid sequence encoding an exogenous effector, and a protein binding sequence, wherein the genetic element comprises one or both of:
[0226] (a) a sequence having at least 85% sequence identity to the Anellovirus 5′ UTR conserved domain of the nucleic acid sequence of Table 1, 3, 5, 7, 9 or 13; or
[0227] (b) a sequence having at least 85% sequence identity to the Anellovirus GC-rich region of the nucleic acid sequence of of Table 1, 3, 5, 7, 9 or 13.

[0228] 136. A genetic element comprising:

[0229] (i) a promoter element and a sequence encoding an effector, e.g., a payload, wherein the effector is exogenous relative to a wild-type Anellovirus sequence;

[0230] (ii) at least 72 contiguous nucleotides (e.g., at least 72, 73, 74, 75, 76, 77, 78, 79, 80, 90, 100, or 150 nucleotides) having at least 75% sequence identity to a wild-type Anellovirus sequence; or at least 100 contiguous nucleotides having at least 72% (e.g., at least 72, 73, 74, 75, 76, 77, 78, 79, 80, 90, 91, 92, 93, 94, 95, 96, 97, 98, 99, or 100%) sequence identity to a wild-type Anellovirus sequence; and

[0231] (iii) a protein binding sequence, e.g., an exterior protein binding sequence, and

[0232] wherein the nucleic acid construct is a single-stranded DNA; and

[0233] wherein the nucleic acid construct is circular and/or integrates at a frequency of less than about 0.001%, 0.005%, 0.01%, 0.05%, 0.1%, 0.5%, 1%, 1.5%, or 2% of the genetic element that enters a cell.

[0234] 137. A method of manufacturing a synthetic curon composition, comprising:

[0235] a) providing a host cell comprising one or more nucleic acid molecules encoding the components of a synthetic curon, e.g., a synthetic curon described herein, wherein the synthetic curon comprises a proteinaceous exterior and a genetic element, e.g., a genetic element comprising a promoter element, a sequence encoding an exogenous effector, (e.g., a payload), and a protein binding sequence (e.g., an exterior protein binding sequence, e.g., a packaging signal);

[0236] b) producing a synthetic curon from the host cell, thereby making a synthetic curon; and

[0237] c) formulating the synthetic curons, e.g., as a pharmaceutical composition suitable for administration to a subject.

[0238] 138. A method of manufacturing a synthetic curon composition, comprising:
[0239] a) providing a plurality of synthetic curons according to any of the preceding embodiments, or a composition or pharmaceutical composition of any of embodiments 95-105;
[0240] b) optionally evaluating the plurality for one or more of: a contaminant described herein, an optical density measurement (e.g., OD 260), particle number (e.g., by HPLC), infectivity (e.g., particle:infectious unit ratio); and
[0241] c) formulating the plurality of synthetic curons, e.g., as a pharmaceutical composition suitable for administration to a subject, e.g., if one or more of the paramaters of (b) meet a specified threshold.

[0242] 139. The method of embodiment 138, wherein the synthetic curon composition comprises at least 10⁵, 10⁶, 10⁷, 10⁸, 10⁹, 10¹⁰, 10¹¹, 10¹², 10¹³, 10¹⁴, or 10¹⁵ synthetic curons.

[0243] 140. The method of embodiment 138 or 139, wherein the synthetic curon composition comprises at least 10 ml, 20 ml, 50 ml, 100 ml, 200 ml, 500 ml, 1 L, 2 L, 5 L, 10 L, 20 L, or 50 L.

[0244] 141. A reaction mixture comprising the synthetic curon of any of the preceding embodiments and a helper virus, wherein the helper virus comprises a polynucleotide, e.g., a polynucleotide encoding an exterior protein, e.g., an exterior protein capable of binding to the exterior protein binding sequence and, optionally, a lipid envelope.

[0245] 142. A reaction mixture comprising the synthetic curon of any of the preceding embodiments and a second nucleic acid sequence encoding one or more of an amino acid sequence chosen from ORF2, ORF2/2, ORF2/3, ORF1, ORF1/1, or ORF1/2 of Table 12, or an amino acid sequence having at least 85% sequence identity thereto.

[0246] 143. A reaction mixture comprising the synthetic curon of any of the preceding embodiments and a second nucleic acid sequence encoding one or more of an amino acid sequence chosen from ORF2, ORF2/2, ORF2/3, ORF2t/3, ORF1, ORF1/1, or ORF1/2 of any of Tables 2, 4, 6, 8, 10, or 14, or an amino acid sequence having at least 85% sequence identity thereto.

[0247] 144. The reaction mixture of embodiment 142 or 143, wherein the second nucleic acid sequence is part of the genetic element.

[0248] 145. The reaction mixture of embodiment 144, wherein the second nucleic acid sequence is not part of the genetic element, e.g., the second nucleic acid sequence is comprised by a helper cell or helper virus.

[0249] 146. A synthetic curon comprising:
[0250] a genetic element comprising (i) a sequence encoding a non-pathogenic exterior protein, (ii) an exterior protein binding sequence that binds the genetic element to the non-pathogenic exterior protein, and (iii) a sequence encoding an effector, e.g., a regulatory nucleic acid; and
[0251] a proteinaceous exterior that is associated with, e.g., envelops or encloses, the genetic element.

[0252] 147. A pharmaceutical composition comprising
[0253] a) a curon comprising:
   [0254] a genetic element comprising (i) a sequence encoding a non-pathogenic exterior protein, (ii) an exterior protein binding sequence that binds the genetic element to the non-pathogenic exterior protein, and (iii) a sequence encoding an effector, e.g., a regulatory nucleic acid; and a proteinaceous exterior that is associated with, e.g., envelops or encloses, the genetic element; and
[0255] b) a pharmaceutical excipient.

[0256] 148. A pharmaceutical composition comprising
[0257] a) at least 10³, 10⁴, 10⁵, 10⁶, 10⁷, 10⁸, or 10⁹ curons (e.g., synthetic curons described herein) comprising:
   [0258] a genetic element comprising (i) a sequence encoding a non-pathogenic exterior protein, (ii) an exterior protein binding sequence that binds the genetic element to the non-pathogenic exterior protein, and (iii) a sequence encoding an effector, e.g., a regulatory nucleic acid; and
   [0259] a proteinaceous exterior that is associated with, e.g., envelops or encloses, the genetic element;
[0260] b) a pharmaceutical excipient, and, optionally,
[0261] c) less than a pre-determined amount of: mycoplasma, endotoxin, host cell nucleic acids (e.g., host cell DNA and/or host cell RNA), animal-derived process impurities (e.g., serum albumin or trypsin), replication-competent agents (RCA), e.g., replication-competent virus or unwanted curons, free viral capsid protein, adventitious agents, and/or aggregates.

[0262] 149. The curon or composition of any one of the previous embodiments, further comprising at least one of the following characteristics: the genetic element is a single-stranded DNA; the genetic element is circular; the curon is non-integrating; the curon has a sequence, structure, and/or function based on an anellovirus or other non-pathogenic virus, and the curon is non-pathogenic.

[0263] 150. The curon or composition of any one of the previous embodiments, wherein the proteinaceous exterior comprises the non-pathogenic exterior protein.

[0264] 151. The curon or composition of any one of the previous embodiments, wherein the proteinaceous exterior comprises one or more of the following: one or more glycosylated proteins, a hydrophilic DNA-binding region, an arginine-rich region, a threonine-rich region, a glutamine-rich region, a N-terminal polyarginine sequence, a variable region, a C-terminal polyglutamine/glutamate sequence, and one or more disulfide bridges.

[0265] 152. The curon or composition of any one of the previous embodiments, wherein the proteinaceous exterior comprises one or more of the following characteristics: an icosahedral symmetry, recognizes and/or binds a molecule that interacts with one or more host cell molecules to mediate entry into the host cell, lacks lipid molecules, lacks carbohydrates, is pH and temperature stable, is detergent resistant, and is non-immunogenic or non-pathogenic in a host.

[0266] 153. The curon or composition of any one of the previous embodiments, wherein the sequence encoding the non-pathogenic exterior protein comprise a sequence at least 70%, 80%, 85%, 90%, 95%, 96%, 97%, 98%, 99% identical to one or more sequences or a fragment thereof listed in Table 15.

[0267] 154. The curon or composition of any one of the previous embodiments, wherein the non-pathogenic exterior protein comprises a sequence at least 70%, 80%, 85%, 90%, 95%, 96%, 97%, 98%, 99% identical to one or more sequences or a fragment thereof listed in Table 16 or Table 17.

[0268] 155. The curon or composition of any one of the previous embodiments, wherein the non-pathogenic exterior protein comprises at least one functional domain that provides one or more functions, e.g., species and/or tissue and/or cell tropism, viral genome binding and/or packaging, immune evasion (non-immunogenicity and/or tolerance), pharmacokinetics, endocytosis and/or cell attachment, nuclear entry, intracellular modulation and localization, exocytosis modulation, propagation, and nucleic acid protection.

[0269] 156. The curon or composition of any one of the previous embodiments, wherein the effector comprises a regulatory nucleic acid, e.g., an miRNA, siRNA, mRNA, lncRNA, RNA, DNA, an antisense RNA, gRNA; a therapeutic, e.g., fluorescent tag or marker, antigen, peptide therapeutic, synthetic or analog peptide from naturally-bioactive peptide, agonist or antagonist peptide, anti-microbial peptide, pore-forming peptide, a bicyclic peptide, a targeting or cytotoxic peptide, a degradation or self-destruction peptide, and degradation or self-destruction peptides, small molecule, immune effector (e.g., influences susceptibility to an immune response/signal), a death protein (e.g., an inducer of apoptosis or necrosis), a non-lytic inhibitor of a tumor (e.g., an inhibitor of an oncoprotein), an epigenetic modifying agent, epigenetic enzyme, a transcription factor, a DNA or protein modification enzyme, a DNA-intercalating agent, an efflux pump inhibitor, a nuclear receptor activator or inhibitor, a proteasome inhibitor, a competitive inhibitor for an enzyme, a protein synthesis effector or inhibitor, a nuclease, a protein fragment or domain, a ligand or a receptor, and a CRISPR system or component.

[0270] 157. The curon or composition of any one of the previous embodiments, wherein the effector comprises a sequence at least 70%, 80%, 85%, 90%, 95%, 96%, 97%, 98%, 99% identical to one or more miRNA sequences listed in Table 18.

[0271] 158. The curon or composition of the previous embodiment, wherein the effector, e.g., miRNA, targets a host gene, e.g., modulates expression of the gene.

[0272] 159. The curon or composition of the previous embodiment, wherein the miRNA, e.g., has at least 70%, 80%, 85%, 90%, 95%, 96%, 97%, 98%, 99% identity to one or more sequences listed in Table 16.

[0273] 160. The curon or composition of any one of the previous embodiments, wherein the genetic element further comprises one or more of the following sequences: a sequence that encodes one or more miRNAs, a sequence that encodes one or more replication proteins, a sequence that encodes an exogenous gene, a sequence that encodes a therapeutic, a regulatory sequence (e.g., a promoter, enhancer), a sequence that encodes one or more regulatory sequences that targets endogenous genes (siRNA, lncRNAs, shRNA), a sequence that encodes a therapeutic mRNA or protein, and a sequence that encodes a cytolytic/cytotoxic RNA or protein.

[0274] 161. The curon or composition of any one of the previous embodiments, wherein the genetic element has one or more of the following characteristics: is non-integrating with a host cell's genome, is an episomal nucleic acid, is a single stranded DNA, is about 1 to 10 kb, exists within the nucleus of the cell, is capable of being bound by endogenous proteins, and produces a microRNA that targets host genes.

[0275] 162. The curon or composition of any one of the previous embodiments, wherein the genetic element comprises at least one viral sequence or at least 70%, 80%, 85%, 90%, 95%, 96%, 97%, 98%, 99% identity to one or more sequences or a fragment thereof listed in Table 19 or Table 20.

[0276] 163. The curon or composition of the previous embodiment, wherein the viral sequence is from at least one of a single stranded DNA virus (e.g., Anellovirus, Bidnavirus, Circovirus, Geminivirus, Genomovirus, Inovirus, Microvirus, Nanovirus, Parvovirus, and Spiravirus), a double stranded DNA virus (e.g., Adenovirus, Ampullavirus, Ascovirus, Asfarvirus, Baculovirus, Fusellovirus, Globulovirus, Guttavirus, Hytrosavirus, Herpesvirus, Iridovirus, Lipothrixvirus, Nimavirus, and Poxvirus), a RNA virus (e.g., Alphavirus, Furovirus, Hepatitis virus, Hordeivirus, Tobamovirus, Tobravirus, Tricornavirus, Rubivirus, Birnavirus, Cystovirus, Partitivirus, and Reovirus).

[0277] 164. The curon or composition of the previous embodiment, wherein the viral sequence is from one or more non-anelloviruses, e.g., adenovirus, herpes virus, pox virus, vaccinia virus, SV40, papilloma virus, an RNA virus such as a retrovirus, e.g., lenti virus, a single-stranded RNA virus, e.g., hepatitis virus, or a double-stranded RNA virus e.g., rotavirus.

[0278] 165. The curon or composition of any one of the previous embodiments, wherein the protein binding sequence interacts with the arginine-rich region of the proteinaceous exterior.

[0279] 166. The curon or composition of any one of the previous embodiments, wherein the curon is capable of replicating in a mammalian cell, e.g., human cell.

[0280] 167. The curon or composition of the previous embodiment, wherein the curon is non-pathogenic and/or non-integrating in a host cell.

[0281] 168. The curon or composition of any one of the previous embodiments, wherein the curon is non-immunogenic in a host.

[0282] 169. The curon or composition of any one of the previous embodiments, wherein the curon inhibits/enhances one or more viral properties, e.g., selectivity, e.g., infectivity, e.g., immunosuppression/activation, in a host or host cell.

[0283] 170. The curon or composition of the previous embodiment, wherein the curon is in an amount sufficient to modulate (e.g., phenotype, virus levels, gene expression, compete with other viruses, disease state, etc. at least about 5%, 10%, 15%, 20%, 25%, 30%, 35%, 40%, 45%, 50%, or more).

[0284] 171. The composition of any one of the previous embodiments further comprising at least one virus or vector comprising a genome of the virus, e.g., a variant of the curon, e.g., a commensal/native virus.

[0285] 172. The composition of any one of the previous embodiments further comprising a heterologous moiety, at least one small molecule, antibody, polypeptide, nucleic acid, targeting agent, imaging agent, nanoparticle, and a combination thereof.

[0286] 173. A vector comprising a genetic element comprising (i) a sequence encoding a non-pathogenic exterior protein, (ii) an exterior protein binding sequence that binds the genetic element to the non-pathogenic exterior protein, and (iii) a sequence encoding an effector, e.g., a regulatory nucleic acid.

[0287] 174. The vector of the previous embodiment, wherein the genetic element fails to integrate with a host cell's genome.

[0288] 175. The vector of any one of the previous embodiments, wherein the genetic element is capable of replicating in a mammalian cell, e.g., human cell.

[0289] 176. The vector of any one of the previous embodiments further comprising an exogenous nucleic acid sequence, e.g., selected to modulate expression of a gene, e.g., a human gene.

[0290] 177. A pharmaceutical composition comprising the vector of any one of the previous embodiments and a pharmaceutical excipient.

[0291] 178. The composition of the previous embodiment, wherein the vector is non-pathogenic and/or non-integrating in a host cell.

[0292] 179. The composition of any one of the previous embodiments, wherein the vector is non-immunogenic in a host.

[0293] 180. The composition of the previous embodiment, wherein the vector is in an amount sufficient to modulate (phenotype, virus levels, gene expression, compete with other viruses, disease state, etc. at least about 5%, 10%, 15%, 20%, 25%, 30%, 35%, 40%, 45%, 50%, or more).

[0294] 181. The composition of any one of the previous embodiments further comprising at least one virus or vector comprising a genome of the virus, e.g., a variant of the curon, a commensal/native virus, a helper virus, a non-anellovirus.

[0295] 182. The composition of any one of the previous embodiments further comprising a heterologous moiety, at least one small molecule, antibody, polypeptide, nucleic acid, targeting agent, imaging agent, nanoparticle, and a combination thereof.

[0296] 183. A method of producing, propagating, and harvesting the curon of any one of the previous embodiments.

[0297] 184. A method of designing and making the vector of any one of the previous embodiments.

[0298] 185. A method of administering to a subject an effective amount of the composition of any one of the previous embodiments.

[0299] 186. A method of identifying dysvirosis in a subject comprising:

[0300] analyzing genetic information from a sample obtained from a subject in need thereof, wherein viral genetic information is isolated from the subject's genetic information and other microorganisms;

[0301] comparing the viral genetic information to a reference, e.g., a control, a healthy subject; and

[0302] identifying dysvirosis in the subject if comparison of the viral genetic information yields an imbalance or irregular ratio of viral genetic information in the subject.

[0303] 187. A method of delivering a nucleic acid or protein payload to a target cell, tissue or subject, the method comprising contacting the target cell, tissue or subject with a nucleic acid composition that comprises (a) a first DNA sequence derived from a virus wherein the first DNA sequence is suffient to enable the production of a particle capable of infecting the target cell, tissue or subject and (a) a second DNA sequence encoding the nucleic acid or protein payload, the improvement comprising:

[0304] the first DNA sequence comprises at least 500 (at least 600, 700, 800, 900, 1000, 1200, 1400, 1500, 1600, 1800, 2000) nucleotides having at least 80% (at least 85%, 90%, 95%, 97%, 99%, 100%) sequence identity to a corresponding sequence listed in any of Tables 1, 3, 5, 7, 9, 11, or 13, or

[0305] the first DNA sequence encodes a sequence having at least 80% (at least 85%, 90%, 95%, 97%, 99%, 100%) sequence identity to an ORF listed in Table 2, 4, 6, 8, 10, 12, or 14, or

[0306] the first DNA sequence comprises a sequence having at least 90% (at least 95%, 97%, 99%, 100%) sequence identity to a consensus sequence listed in Table 14-1.

[0307] Other features, objects, and advantages of the invention will be apparent from the description and drawings, and from the claims.

[0308] Unless otherwise defined, all technical and scientific terms used herein have the same meaning as commonly understood by one of ordinary skill in the art to which this invention belongs. All publications, patent applications, patents, and other references mentioned herein are incorporated by reference in their entirety. In addition, the materials, methods, and examples are illustrative only and not intended to be limiting.

### BRIEF DESCRIPTION OF THE DRAWINGS

[0309] The following detailed description of the embodiments of the invention will be better understood when read in conjunction with the appended drawings. For the purpose of illustrating the invention, there are shown in the drawings embodiments, which are presently exemplified. It should be understood, however, that the invention is not limited to the precise arrangement and instrumentalities of the embodiments shown in the drawings.

[0310] FIG. 1A is an illustration showing percent sequence similarity of amino acid regions of capsid protein sequences.

[0311] FIG. 1B is an illustration showing percent sequence similarity of capsid protein sequences.

[0312] FIG. 2 is an illustration showing one embodiment of a curon.

[0313] FIG. 3 depicts a schematic of a kanamycin vector encoding the LY1 strain of TTMiniV (“Curon 1”).

[0314] FIG. 4 depicts a schematic of a kanamycin vector encoding the LY2 strain of TTMiniV (“Curon 2”).

[0315] FIG. 5 depicts transfection efficiency of synthetic curons in 293T and A549 cells.

[0316] FIGS. 6A and 6B depict quantitative PCR results that illustrate successful infection of 293T cells by synthetic curons.

[0317] FIGS. 7A and 7B depict quantitative PCR results that illustrate successful infection of A549 cells by synthetic curons.

[0318] FIGS. 8A and 8B depict quantitative PCR results that illustrate successful infection of Raji cells by synthetic curons.

[0319] FIGS. 9A and 9B depict quantitative PCR results that illustrate successful infection of Jurkat cells by synthetic curons.

[0320] FIGS. 10A and 10B depict quantitative PCR results that illustrate successful infection of Chang cells by synthetic curons.

[0321] FIGS. 11A-11B are a series of graphs showing luciferase expression from cells transfected or infected with TTMV-LY2Δ574-1371,Δ1432-2210,2610::nLuc. Luminescence was observed in infected cells, indicating successful replication and packaging.

[0322] FIG. 11C is a diagram depicting the phylogenetic tree of alphatorquevirus (Torque Teno Virus; TTV), with clades highlighted. At least 100 Anellovirus strains are represented, divided into five clades. Exemplary sequences from each of the five clades is provided herein, e.g., in Tables 1-14. Top box=clade 1; Top middle box=clade 2; Middle box=clade 3, Lower middle box=clade 4; Bottom box=clade 5.

[0323] FIG. 12 is a schematic showing an exemplary workflow for production of curons (e.g., replication-competent or replication-deficient curons as described herein).

[0324] FIG. 13 is a graph showing primer specificity for primer sets designed for quantification of TTV and TTMV genomic equivalents. Quantitative PCR based on SYBR green chemistry shows one distinct peak for each of the amplification products using TTMV or TTV specific primer sets, as indicated, on plasmids encoding the respective genomes.

[0325] FIG. 14 is a series of graphs showing PCR efficiencies in the quantification of TTV genome equivalents by qPCR. Increasing concentrations of primers and a fixed concentration of hydrolysis probe (250 nM) were used with two different commercial qPCR master mixes. Efficiencies of 90-110% resulted in minimal error propagation during quantification.

[0326] FIG. 15 is a graph showing an exemplary amplification plot for linear amplification of TTMV (Target 1) or TTV (Target 2) over a 7 log 10 of genome equivalent concentrations. Genome equivalents were quantified over 7 10-fold dilutions with high PCR efficiencies and linearity (R² TTMV: 0.996; R² TTV:0.997).

[0327] FIGS. 16A-16B are a series of graphs showing quantification of TTMV genome equivalents in a curon stock. (A) Amplification plot of two stocks, each diluted 1:10 and run in duplicate. (B) The same two samples as shown in panel A, here shown in the context of the linear range. Shown are the upper and lower limits in the two representative samples. PCR Efficiency: 99.58%, R²: 0988.

[0328] FIGS. 17A and 17B are a series of graphs showing the functional effects of a synthetic curon comprising an exogenous miRNA, miR-625. (A) Impact on cell viability of non-small cell lung cancer (NSCLC) cells when infected with curons expressing miR-625 in three different NSCLC cell lines (A549 cells, NCI-H40 cells, and SW900 cells). (B) Impact of curons expressing miR-625 on expression of a YFP reporter by HEK293T cells.

[0329] FIG. 17C is a graph showing quantification of p65 immunoblot analysis normalized to total protein for SW900 cells, either contacted with the indicated curons or left untreated.

[0330] FIG. 18 is a diagram showing pairwise identity for alignments of viral DNA sequences within the five alphatorquevirus clades. DNA sequences for viruses from each TTV clade were aligned. Pairwise percent identity across a 50-bp sliding window is shown along the length of the alignments for each clade. Average pairwise identity is indicated.

[0331] FIG. 19 is a diagram showing pairwise identity for alignments of representative sequences from each alphatorquevirus clade. DNA sequences for TTV-CT30F, TTV-TJN02, TTV-tth8, TTV-JA20, and TTV-HD23a were aligned. Pairwise percent identity across a 50-bp sliding window is shown along the length of the alignment. Brackets above indicate non-coding and coding regions with pairwise identities are indicated. Brackets below indicate regions of high sequence conservation.

[0332] FIG. 20 is a diagram showing pairwise identity for amino acid alignments for putative proteins across the five alphatorquevirus clades Amino acid sequences for putative proteins from TTV-CT30F, TTV-TJN02, TTV-tth8, TTV-JA20, and TTV-HD23a were aligned. Pairwise percent identity across a 50-aa sliding window is shown along the length of each alignment. Pairwise identity for both open reading frame DNA sequence and protein amino acid sequence is indicated.

[0333] FIG. 21 is a diagram showing that a domain within the 5′ UTR is highly conserved across the five alphatorquevirus clades. The 71-bp 5′UTR conserved domain sequences for each representative alphatorquevirus were aligned. The sequence has 96.6% pairwise identity between the five clades. The sequences shown in FIG. 21 (SEQ ID NOS 703-708, respectively, in order of appearance) are also listed, e.g., in Table 16-1 herein.

[0334] FIG. 22 is a diagram showing an alignment of the GC-rich domains from the five alphatorquevirus clades. Each anellovirus has a region downstream of the ORFs with greater than 70% GC content. Shown is an alignment of the GC-rich regions from TTV-CT30F, TTV-TJN02, TTV-tth8, TTV-JA20, and TTV-HD23a. The regions vary in length, but where they align, they show a 81.8% pairwise identity. The sequences shown in FIG. 22 (SEQ ID NOS 709-714, respectively, in order of appearance) are also listed, e.g., in Table 16-2 herein.

### DETAILED DESCRIPTION OF CERTAIN EMBODIMENTS

### Definitions

[0335] The wording “compound, composition, product, etc. for treating, modulating, etc.” is to be understood to refer a compound, composition, product, etc. per se which is suitable for the indicated purposes of treating, modulating, etc. The wording “compound, composition, product, etc. for treating, modulating, etc.” additionally discloses that, as an embodiment, such compound, composition, product, etc. is for use in treating, modulating, etc.

[0336] The wording “compound, composition, product, etc. for use in . . . ” or “use of a compound, composition, product, etc in the manufacture of a medicament, pharmaceutical composition, veterinary composition, diagnostic composition, etc. for . . . ” indicates that such compounds, compositions, products, etc. are to be used in therapeutic methods which may be practiced on the human or animal body. They are considered as an equivalent disclosure of embodiments and claims pertaining to methods of treatment, etc. If an embodiment or a claim thus refers to “a compound for use in treating a human or animal being suspected to suffer from a disease”, this is considered to be also a disclosure of a “use of a compound in the manufacture of a medicament for treating a human or animal being suspected to suffer from a disease” or a “method of treatment by administering a compound to a human or animal being suspected to suffer from a disease”. The wording “compound, composition, product, etc. for treating, modulating, etc.” is to be understood to refer a compound, composition, product, etc. per se which is suitable for the indicated purposes of treating, modulating, etc.

[0337] If hereinafter examples of a term, value, number, etc. are provided in parentheses, this is to be understood as an indication that the examples mentioned in the parentheses can constitute an embodiment. For example, if it stated that “in embodiments, the nucleic acid molecule comprises a nucleic acid sequence having at least about 70%, 75%, 80%, 85%, 90%, 95%, 96%, 97%, 98%, 99%, or 100% sequence identity to the Anellovirus ORF1 nucleotide sequence of Table 1 (e.g., nucleotides 571-2613 of the nucleic acid sequence of Table 1)”, then some embodiments relate to nucleic acid molecules comprising a nucleic acid sequence having at least about 70%, 75%, 80%, 85%, 90%, 95%, 96%, 97%, 98%, 99%, or 100% sequence identity to nucleotides 571-2613 of the nucleic acid sequence of Table 1.

[0338] As used herein, the term “curon” refers to a vehicle comprising a genetic element, e.g., an episome, e.g., circular DNA, enclosed in a proteinaceous exterior. A “synthetic curon,” as used herein, generally refers to a curon that is not naturally occurring, e.g., has a sequence that is modified relative to a wild-type virus (e.g., a wild-type Anellovirus as described herein). In some embodiments, the synthetic curon is engineered or recombinant, e.g., comprises a genetic element that comprises a modification relative to a wild-type viral genome (e.g., a wild-type Anellovirus genome as described herein). In some embodiments, enclosed within a proteinaceous exterior encompasses 100% coverage by a proteinaceous exterior, as well as less than 100% coverage, e.g., 95%, 90%, 85%, 80%, 70%, 60%, 50% or less. For example, gaps or discontinuities (e.g., that render the proteinaceous exterior permeable to water, ions, peptides, or small molecules) may be present in the proteinaceous exterior, so long as the genetic element is retained in the proteinaceous exterior, e.g., prior to entry into a host cell. In some embodiments, the curon is purified, e.g., it is separated from its original source and/or substantially free (>50%, >60%, >70%, >80%, >90%) of other components.

[0339] As used herein, a nucleic acid “encoding” refers to a nucleic acid sequence encoding an amino acid sequence or a functional polynucleotide (e.g., a non-coding RNA, e.g., an siRNA or miRNA).

[0340] As used herein, the term “dysvirosis” refers to a dysregulation of the virome in a subject.

[0341] An “exogenous” agent (e.g., an effector, a nucleic acid (e.g., RNA), a gene, payload, protein) as used herein refers to an agent that is either not comprised by, or not encoded by, a corresponding wild-type virus, e.g., an Anellovirus as described herein. In some embodiments, the exogenous agent does not naturally exist, such as a protein or nucleic acid that has a sequence that is altered (e.g., by insertion, deletion, or substitution) relative to a naturally occurring protein or nucleic acid. In some embodiments, the exogenous agent does not naturally exist in the host cell. In some embodiments, the exogenous agent exists naturally in the host cell but is exogenous to the virus. In some embodiments, the exogenous agent exists naturally in the host cell, but is not present at a desired level or at a desired time.

[0342] As used herein, the term “genetic element” refers to a nucleic acid sequence, generally in a curon. It is understood that the genetic element can be produced as naked DNA and optionally further assembled into a proteinaceous exterior. It is also understood that a curon can insert its genetic element into a cell, resulting in the genetic element being present in the cell and the proteinaceous exterior not necessarily entering the cell.

[0343] As used herein, a “substantially non-pathogenic” organism, particle, or component, refers to an organism, particle (e.g., a virus or a curon, e.g., as described herein), or component thereof that does not cause or induce a detectable disease or pathogenic condition, e.g., in a host organism, e.g., a mammal, e.g., a human. In some embodiments, administration of a curon to a subject can result in minor reactions or side effects that are acceptable as part of standard of care.

[0344] As used herein, the term “non-pathogenic” refers to an organism or component thereof that does not cause or induce a detectable disease or pathogenic condition, e.g., in a host organism, e.g., a mammal, e.g., a human.

[0345] As used herein, a “substantially non-integrating” genetic element refers to a genetic element, e.g., a genetic element in a virus or curon, e.g., as described herein, wherein less than about 0.01%, 0.05%, 0.1%, 0.5%, or 1% of the genetic element that enter into a host cell (e.g., a eukaryotic cell) or organism (e.g., a mammal, e.g., a human) integrate into the genome. In some embodiments the genetic element does not detectably integrate into the genome of, e.g., a host cell. In some embodiments, integration of the genetic element into the genome can be detected using techniques as described herein, e.g., nucleic acid sequencing, PCR detection and/or nucleic acid hybridization.

[0346] As used herein, a “substantially non-immunogenic” organism, particle, or component, refers to an organism, particle (e.g., a virus or curon, e.g., as described herein), or component thereof, that does not cause or induce an undesired or untargeted immune response, e.g., in a host tissue or organism (e.g., a mammal, e.g., a human). In embodiments, the substantially non-immunogenic organism, particle, or component does not produce a detectable immune response. In embodiments, the substantially non-immunogenic curon does not produce a detectable immune response against a protein comprising an amino acid sequence or encoded by a nucleic acid sequence shown in any of Tables 1-14. In embodiments, an immune response (e.g., an undesired or untargeted immune response) is detected by assaying antibody presence or level (e.g., presence or level of an anti-curon antibody, e.g., presence or level of an antibody against a synthetic curon as described herein) in a subject, e.g., according to the anti-TTV antibody detection method described in Tsuda et al. (1999; J. Virol. Methods 77: 199-206; incorporated herein by reference) and/or the method for determining anti-TTV IgG levels described in Kakkola et al. (2008; Virology 382: 182-189; incorporated herein by reference). Antibodies against an Anellovirus or a curon based thereon can also be detected by methods in the art for detecting anti-viral antibodies, e.g., methods of detecting anti-AAV antibodies, e.g., as described in Calcedo et al. (2013; Front. Immunol. 4(341): 1-7; incorporated herein by reference).

[0347] As used herein, the term “proteinaceous exterior” refers to an exterior component that is predominantly protein.

[0348] As used herein, the term “regulatory nucleic acid” refers to a nucleic acid sequence that modifies expression, e.g., transcription and/or translation, of a DNA sequence that encodes an expression product. In embodiments, the expression product comprises RNA or protein.

[0349] As used herein, the term “regulatory sequence” refers to a nucleic acid sequence that modifies transcription of a target gene product. In some embodiments, the regulatory sequence is a promoter or an enhancer.

[0350] As used herein, the term “replication protein” refers to a protein, e.g., a viral protein, that is utilized during infection, viral genome replication/expression, viral protein synthesis, and/or assembly of the viral components.

[0351] As used herein, “treatment”, “treating” and cognates thereof refer to the medical management of a subject with the intent to improve, ameliorate, stabilize, prevent or cure a disease, pathological condition, or disorder. This term includes active treatment (treatment directed to improve the disease, pathological condition, or disorder), causal treatment (treatment directed to the cause of the associated disease, pathological condition, or disorder), palliative treatment (treatment designed for the relief of symptoms), preventative treatment (treatment directed to preventing, minimizing or partially or completely inhibiting the development of the associated disease, pathological condition, or disorder); and supportive treatment (treatment employed to supplement another therapy).

[0352] As used herein, the term “virome” refers to viruses in a particular environment, e.g., a part of a body, e.g., in an organism, e.g. in a cell, e.g. in a tissue.

[0353] This invention relates generally to curons, e.g., synthetic curons, and uses thereof. The present disclosure provides synthetic curons, compositions comprising synthetic curons, and methods of making or using synthetic curons. Synthetic curons are generally useful as delivery vehicles, e.g., for delivering a therapeutic agent to a eukaryotic cell. Generally, a synthetic curon will include a genetic element comprising an exogenous nucleic acid sequence (e.g., encoding an exogenous effector) enclosed within a proteinaceous exterior. Synthetic curons can be used as a substantially non-immunogenic vehicle for delivering the genetic element, or an effector encoded therein (e.g., a polypeptide or nucleic acid effector, e.g., as described herein), into eukaryotic cells, e.g., to treat a disease or disorder in a subject comprising the cells.

### Curon

[0354] In some aspects, the invention described herein comprises compositions and methods of using and making a synthetic curon. In some embodiments, a curon comprises a genetic element (e.g., circular DNA, e.g., single stranded DNA), which comprise at least one exogenous element relative to the remainder of the genetic element and/or the proteinaceous exterior (e.g., an exogenous element encoding an effector, e.g., as described herein). A curon may be a delivery vehicle (e.g., a substantially non-pathogenic delivery vehicle) for a payload into a host, e.g., a human. In some embodiments, the curon is capable of replicating in a eukaryotic cell, e.g., a mammalian cell, e.g., a human cell. In some embodiments, the curon is substantially non-pathogenic and/or substantially non-integrating in the mammalian (e.g., human) cell. In some embodiments, the curon is substantially non-immunogenic in a mammal, e.g., a human. In some embodiments, the curon has a sequence, structure, and/or function that is based on an Anellovirus (e.g., an Anellovirus as described, e.g., an Anellovirus comprising a nucleic acid or polypeptide comprising a sequence as shown in any of Tables 1-14) or other substantially non-pathogenic virus, e.g., a symbiotic virus, commensal virus, native virus. Generally, an Anellovirus-based curon comprises at least one element exogenous to that Anellovirus, e.g., an exogenous effector or a nucleic acid sequence encoding an exogenous effector disposed within a genetic element of the curon. In some embodiments, the curon is replication-deficient. In some embodiments, the curon is replication-competent.

[0355] In an aspect, the invention includes a synthetic curon comprising (i) a genetic element comprising a promoter element, a sequence encoding an exogenous effector, (e.g., a payload), and a protein binding sequence (e.g., an exterior protein binding sequence, e.g., a packaging signal), wherein the genetic element is a single-stranded DNA, and has one or both of the following properties: is circular and/or integrates into the genome of a eukaryotic cell at a frequency of less than about 0.001%, 0.005%, 0.01%, 0.05%, 0.1%, 0.5%, 1%, 1.5%, or 2% of the genetic element that enters the cell; and (ii) a proteinaceous exterior; wherein the genetic element is enclosed within the proteinaceous exterior; and wherein the synthetic curon is capable of delivering the genetic element into a eukaryotic cell.

[0356] In some embodiments of the synthetic curon described herein, the genetic element integrates at a frequency of less than about 0.001%, 0.005%, 0.01%, 0.05%, 0.1%, 0.5%, 1%, 1.5%, or 2% of the genetic element that enters a cell. In some embodiments, less than about 0.01%, 0.05%, 0.1%, 0.5%, 1%, 2%, 3%, 4%, or 5% of the genetic elements from a plurality of the synthetic curons administered to a subject will integrate into the genome of one or more host cells in the subject. In some embodiments, the genetic elements of a population of synthetic curons, e.g., as described herein, integrate into the genome of a host cell at a frequency less than that of a comparable population of AAV viruses, e.g., at about a 50%, 60%, 70%, 75%, 80%, 85%, 90%, 95%, 100%, or more lower frequency than the comparable population of AAV viruses.

[0357] In an aspect, the invention includes a synthetic curon comprising: (i) a genetic element comprising a promoter element and a sequence encoding an exogenous effector (e.g., a payload), and a protein binding sequence (e.g., an exterior protein binding sequence), wherein the genetic element has at least 75% (e.g., at least 75, 76, 77, 78, 79, 80, 90, 91, 92, 93, 94, 95, 96, 97, 98, 99, or 100%) sequence identity to a wild-type Anellovirus sequence (e.g., a wild-type Torque Teno virus (TTV), Torque Teno mini virus (TTMV), or TTMDV sequence, e.g., a wild-type Anellovirus sequence as listed in any of Tables 1, 3, 5, 7, 9, 11, or 13); and (ii) a proteinaceous exterior; wherein the genetic element is enclosed within the proteinaceous exterior; and wherein the synthetic curon is capable of delivering the genetic element into a eukaryotic cell.

[0358] In one aspect, the invention includes a synthetic curon comprising:

[0359] a) a genetic element comprising (i) a sequence encoding a non-pathogenic exterior protein, (ii) an exterior protein binding sequence that binds the genetic element to the non-pathogenic exterior protein, and (iii) a sequence encoding a regulatory nucleic acid; and

[0360] b) a proteinaceous exterior that is associated with, e.g., envelops or encloses, the genetic element.

[0361] In some embodiments, the curon includes sequences or expression products from (or having >70%, 75%, 80%, 85%, 90%, 95%, 97%, 98%, 99%, 100% homology to) a non-enveloped, circular, single-stranded DNA virus. Animal circular single-stranded DNA viruses generally refer to a subgroup of single strand DNA (ssDNA) viruses, which infect eukaryotic non-plant hosts, and have a circular genome. Thus, animal circular ssDNA viruses are distinguishable from ssDNA viruses that infect prokaryotes (i.e. Microviridae and Inoviridae) and from ssDNA viruses that infect plants (i.e. Geminiviridae and Nanoviridae). They are also distinguishable from linear ssDNA viruses that infect non-plant eukaryotes (i.e. Parvoviridiae).

[0362] In some embodiments, the curon modulates a host cellular function, e.g., transiently or long term. In certain embodiments, the cellular function is stably altered, such as a modulation that persists for at least about 1 hr to about 30 days, or at least about 2 hrs, 6 hrs, 12 hrs, 18 hrs, 24 hrs, 2 days, 3, days, 4 days, 5 days, 6 days, 7 days, 8 days, 9 days, 10 days, 11 days, 12 days, 13 days, 14 days, 15 days, 16 days, 17 days, 18 days, 19 days, 20 days, 21 days, 22 days, 23 days, 24 days, 25 days, 26 days, 27 days, 28 days, 29 days, 30 days, 60 days, or longer or any time therebetween.

[0363] In certain embodiments, the cellular function is transiently altered, e.g., such as a modulation that persists for no more than about 30 mins to about 7 days, or no more than about 1 hr, 2 hrs, 3 hrs, 4 hrs, 5 hrs, 6 hrs, 7 hrs, 8 hrs, 9 hrs, 10 hrs, 11 hrs, 12 hrs, 13 hrs, 14 hrs, 15 hrs, 16 hrs, 17 hrs, 18 hrs, 19 hrs, 20 hrs, 21 hrs, 22 hrs, 24 hrs, 36 hrs, 48 hrs, 60 hrs, 72 hrs, 4 days, 5 days, 6 days, 7 days, or any time therebetween.

[0364] In some embodiments, the genetic element comprises a promoter element. In embodiments, the promoter element is selected from an RNA polymerase II-dependent promoter, an RNA polymerase III-dependent promoter, a PGK promoter, a CMV promoter, an EF-1α promoter, an SV40 promoter, a CAGG promoter, or a UBC promoter, TTV viral promoters, Tissue specific, U6 (pollIII), minimal CMV promoter with upstream DNA binding sites for activator proteins (TetR-VP16, Ga14-VP16, dCas9-VP16, etc). In embodiments, the promoter element comprises a TATA box. In embodiments, the promoter element is endogenous to a wild-type Anellovirus, e.g., as described herein.

[0365] In some embodiments, the genetic element comprises one or more of the following characteristics: single-stranded, circular, negative strand, and/or DNA. In embodiments, the genetic element comprises an episome. In some embodiments, the portions of the genetic element excluding the effector have a combined size of about 2.5-5 kb (e.g., about 2.8-4 kb, about 2.8-3.2 kb, about 3.6-3.9 kb, or about 2.8-2.9 kb), less than about 5 kb (e.g., less than about 2.9 kb, 3.2 kb, 3.6 kb, 3.9 kb, or 4 kb), or at least 100 nucleotides (e.g., at least lkb).

[0366] The curons, compositions comprising curons, methods using such curons, etc., as described herein are, in some instances, based in part on the examples which illustrate how different effectors, for example miRNAs (e.g. against IFN or miR-625), shRNA, etc and protein binding sequences, for example DNA sequences that bind to capsid protein such as Q99153, are combined with proteinaceious exteriors, for example a capsid disclosed in Arch Virol (2007) 152: 1961-1975, to produce curons which can then be used to deliver an exogenous effector to cells (e.g., animal cells, e.g., human cells or non-human animal cells such as pig or mouse cells). In embodiments, the exogenous effector can silence expression of a factor such as an interferon. The examples further describe how curons can be made by inserting exogenous effectors into sequences derived, e.g., from Anellovirus. It is on the basis of these examples that the description hereinafter contemplates various variations of the specific findings and combinations considered in the examples. For example, the skilled person will understand from the examples that the specific miRNAs are used just as an example of an exogenous effector and that other exogenous effectors may be, e.g., other regulatory nucleic acids or therapeutic peptides. Similarly, the specific capsids used in the examples may be replaced by substantially non-pathogenic proteins described hereinafter. The specifc Anellovirus sequences described in the examples may also be replaced by the Anellovirus sequences described hereinafter. These considerations similarly apply to protein binding sequences, regulatory sequences such as promoters, and the like. Independent thereof, the person skilled in the art will in particular consider such embodiments which are closely related to the examples.

[0367] In some embodiments, a curon, or the genetic element comprised in the curon, is introduced into a cell (e.g., a human cell). In some embodiments, the exogenous effector (e.g., an RNA, e.g., an miRNA), e.g., encoded by the genetic element of a curon, is expressed in a cell (e.g., a human cell), e.g., once the curon or the genetic element has been introduced into the cell, e.g., as described in Example 19. In embodiments, introduction of the curon, or genetic element comprised therein, into a cell modulates (e.g., increases or decreases) the level of a target molecule (e.g., a target nucleic acid, e.g., RNA, or a target polypeptide) in the cell, e.g., by altering the expression level of the target molecule by the cell (e.g., as described in Example 22). In embodiments, introduction of the curon, or genetic element comprised therein, decreases level of interferon produced by the cell, e.g., as described in Examples 3 and 4. In embodiments, introduction of the curon, or genetic element comprised therein, into a cell modulates (e.g., increases or decreases) a function of the cell. In embodiments, introduction of the curon, or genetic element comprised therein, into a cell modulates (e.g., increases or decreases) the viability of the cell. In embodiments, introduction of the curon, or genetic element comprised therein, into a cell decreases viability of a cell (e.g., a cancer cell), e.g., as described in Example 22.

[0368] In some embodiments, a curon (e.g., a synthetic curon) described herein induces an antibody prevalence of less than 70% (e.g., less than about 60%, 50%, 40%, 30%, 20%, or 10% antibody prevalence). In embodiments, antibody prevalence is determined according to methods known in the art. In embodiments, antibody prevalence is determined by detecting antibodies against an Anellovirus (e.g., as described herein), or a curon based thereon, in a biological sample, e.g., according to the anti-TTV antibody detection method described in Tsuda et al. (1999; J. Virol. Methods 77: 199-206; incorporated herein by reference) and/or the method for determining anti-TTV IgG seroprevalence described in Kakkola et al. (2008; Virology 382: 182-189; incorporated herein by reference). Antibodies against an Anellovirus or a curon based thereon can also be detected by methods in the art for detecting anti-viral antibodies, e.g., methods of detecting anti-AAV antibodies, e.g., as described in Calcedo et al. (2013; Front. Immunol. 4(341): 1-7; incorporated herein by reference).

### Anelloviruses

[0369] In some embodiments, a synthetic curon, e.g., as described herein, comprises sequences or expression products derived from an Anellovirus. Generally, a synthetic curon includes one or more sequences or expression products that are exogenous relative to the Anellovirus. The Anellovirus genus was once classified as a clade within the Circoviridae family, and has more recently been classified as a separate family. Anelloviruses generally have single-stranded circular DNA genomes with negative polarity. Anellovirus has not been linked to any human disease. However, attempts to link Anellovirus infection with human disease are confounded by the high incidence of asymptomatic Anellovirus viremia in control cohort population(s), the remarkable genomic diversity within the anellovirus viral family, the historical inability to propagate the agent in vitro, and the lack of animal model(s) of Anellovirus disease (Yzebe et al., Panminerva Med. (2002) 44:167-177; Biagini, P., Vet. Microbiol. (2004) 98:95-101).

[0370] Anellovirus appears to be transmitted by oronasal or fecal-oral infection, mother-to-infant and/or in utero transmission (Gerner et al., Ped. Infect. Dis. J. (2000) 19:1074-1077). Infected persons are characterized by a prolonged (months to years) Anellovirus viremia. Humans may be co-infected with more than one genogroup or strain (Saback, et al., Scad. J. Infect. Dis. (2001) 33:121-125). There is a suggestion that these genogroups can recombine within infected humans (Rey et al., Infect. (2003) 31:226-233). The double stranded isoform (replicative) intermediates have been found in several tissues, such as liver, peripheral blood mononuclear cells and bone marrow (Kikuchi et al., J. Med. Virol. (2000) 61:165-170; Okamoto et al., Biochem. Biophys. Res. Commun. (2002) 270:657-662; Rodriguez-lnigo et al., Am. J. Pathol. (2000) 156:1227-1234).

[0371] In some embodiments, a curon as described herein comprises one or more nucleic acid molecules (e.g., a genetic element as described herein) comprising a sequence having at least about 70%, 75%, 80%, 85%, 90%, 95%, 96%, 97%, 98%, 99%, or 100% sequence identity to an Anellovirus sequence, e.g., as described herein, or a fragment thereof. In embodiments, the Anellovirus sequence is selected from a sequence as shown in any of Tables 1, 3, 5, 7, 9, 11, or 13. In some embodiments, a curon as described herein comprises one or more nucleic acid molecules (e.g., a genetic element as described herein) comprising a sequence having at least about 70%, 75%, 80%, 85%, 90%, 95%, 96%, 97%, 98%, 99%, or 100% sequence identity to a TATA box, cap site, transcriptional start site, 5′ UTR conserved domain, ORF1, ORF1/1, ORF1/2, ORF2, ORF2/2, ORF2/3, ORF2t/3, three open-reading frame region, poly(A) signal, GC-rich region, or any combination thereof, of any of the Anelloviruses described herein (e.g., an Anellovirus sequence as annotated, or as encoded by a sequence listed, in any of Tables 1-16 or 19). In some embodiments, the nucleic acid molecule comprises a sequence encoding a capsid protein, e.g., an ORF1, ORF1/1, ORF1/2, ORF2, ORF2/2, ORF2/3, ORF2t/3 sequence of any of the Anelloviruses described herein (e.g., an Anellovirus sequence as annotated, or as encoded by a sequence listed, in any of Tables 1-16 or 19). In embodiments, the nucleic acid molecule comprises a sequence encoding a capsid protein comprising an amino acid sequence having at least about 70%, 75%, 80%, 85%, 90%, 95%, 96%, 97%, 98%, 99%, or 100% sequence identity to an Anellovirus ORF1 or ORF2 protein (e.g., an ORF1 or ORF2 amino acid sequence as shown in any of Tables 2, 4, 6, 8, 10, 12, 14, or 16, or an ORF1 or ORF2 amino acid sequence encoded by a nucleic acid sequence as shown in any of Tables 1, 3, 5, 7, 9, 11, 13, 15, or 19).

[0372] In embodiments, the nucleic acid molecule comprises a nucleic acid sequence having at least about 70%, 75%, 80%, 85%, 90%, 95%, 96%, 97%, 98%, 99%, or 100% sequence identity to the Anellovirus ORF1 nucleotide sequence of Table 1 (e.g., nucleotides 571-2613 of the nucleic acid sequence of Table 1). In embodiments, the nucleic acid molecule comprises a nucleic acid sequence having at least about 70%, 75%, 80%, 85%, 90%, 95%, 96%, 97%, 98%, 99%, or 100% sequence identity to the Anellovirus ORF1/1 nucleotide sequence of Table 1 (e.g., nucleotides 571-587 and/or 2137-2613 of the nucleic acid sequence of Table 1). In embodiments, the nucleic acid molecule comprises a nucleic acid sequence having at least about 70%, 75%, 80%, 85%, 90%, 95%, 96%, 97%, 98%, 99%, or 100% sequence identity to the Anellovirus ORF1/2 nucleotide sequence of Table 1 (e.g., nucleotides 571-687 and/or 2339-2659 of the nucleic acid sequence of Table 1). In embodiments, the nucleic acid molecule comprises a nucleic acid sequence having at least about 70%, 75%, 80%, 85%, 90%, 95%, 96%, 97%, 98%, 99%, or 100% sequence identity to the Anellovirus ORF2 nucleotide sequence of Table 1 (e.g., nucleotides 299-691 of the nucleic acid sequence of Table 1). In embodiments, the nucleic acid molecule comprises a nucleic acid sequence having at least about 70%, 75%, 80%, 85%, 90%, 95%, 96%, 97%, 98%, 99%, or 100% sequence identity to the Anellovirus ORF2/2 nucleotide sequence of Table 1 (e.g., nucleotides 299-687 and/or 2137-2659 of the nucleic acid sequence of Table 1). In embodiments, the nucleic acid molecule comprises a nucleic acid sequence having at least about 70%, 75%, 80%, 85%, 90%, 95%, 96%, 97%, 98%, 99%, or 100% sequence identity to the Anellovirus ORF2/3 nucleotide sequence of Table 1 (e.g., nucleotides 299-687 and/or 2339-2831 of the nucleic acid sequence of Table 1). In embodiments, the nucleic acid molecule comprises a nucleic acid sequence having at least about 70%, 75%, 80%, 85%, 90%, 95%, 96%, 97%, 98%, 99%, or 100% sequence identity to the Anellovirus ORF2t/3 nucleotide sequence of Table 1 (e.g., nucleotides 299-348 and/or 2339-2831 of the nucleic acid sequence of Table 1). In embodiments, the nucleic acid molecule comprises a nucleic acid sequence having at least about 70%, 75%, 80%, 85%, 90%, 95%, 96%, 97%, 98%, 99%, or 100% sequence identity to the Anellovirus TATA box nucleotide sequence of Table 1 (e.g., nucleotides 84-90 of the nucleic acid sequence of Table 1). In embodiments, the nucleic acid molecule comprises a nucleic acid sequence having at least about 70%, 75%, 80%, 85%, 90%, 95%, 96%, 97%, 98%, 99%, or 100% sequence identity to the Anellovirus Cap site nucleotide sequence of Table 1 (e.g., nucleotides 107-114 of the nucleic acid sequence of Table 1). In embodiments, the nucleic acid molecule comprises a nucleic acid sequence having at least about 70%, 75%, 80%, 85%, 90%, 95%, 96%, 97%, 98%, 99%, or 100% sequence identity to the Anellovirus transcriptional start site nucleotide sequence of Table 1 (e.g., nucleotide 114 of the nucleic acid sequence of Table 1). In embodiments, the nucleic acid molecule comprises a nucleic acid sequence having at least about 70%, 75%, 80%, 85%, 90%, 95%, 96%, 97%, 98%, 99%, or 100% sequence identity to the Anellovirus 5′ UTR conserved domain nucleotide sequence of Table 1 (e.g., nucleotides 177-247 of the nucleic acid sequence of Table 1). In embodiments, the nucleic acid molecule comprises a nucleic acid sequence having at least about 70%, 75%, 80%, 85%, 90%, 95%, 96%, 97%, 98%, 99%, or 100% sequence identity to the Anellovirus three open-reading frame region nucleotide sequence of Table 1 (e.g., nucleotides 2325-2610 of the nucleic acid sequence of Table 1). In embodiments, the nucleic acid molecule comprises a nucleic acid sequence having at least about 70%, 75%, 80%, 85%, 90%, 95%, 96%, 97%, 98%, 99%, or 100% sequence identity to the Anellovirus poly(A) signal nucleotide sequence of Table 1 (e.g., nucleotides 2813-2818 of the nucleic acid sequence of Table 1). In embodiments, the nucleic acid molecule comprises a nucleic acid sequence having at least about 70%, 75%, 80%, 85%, 90%, 95%, 96%, 97%, 98%, 99%, or 100% sequence identity to the Anellovirus GC-rich nucleotide sequence of Table 1 (e.g., nucleotides 3415-3570 of the nucleic acid sequence of Table 1).

[0373] In embodiments, the nucleic acid molecule comprises a nucleic acid sequence having at least about 70%, 75%, 80%, 85%, 90%, 95%, 96%, 97%, 98%, 99%, or 100% sequence identity to the Anellovirus ORF1 nucleotide sequence of Table 3 (e.g., nucleotides 599-2839 of the nucleic acid sequence of Table 3). In embodiments, the nucleic acid molecule comprises a nucleic acid sequence having at least about 70%, 75%, 80%, 85%, 90%, 95%, 96%, 97%, 98%, 99%, or 100% sequence identity to the Anellovirus ORF1/1 nucleotide sequence of Table 3 (e.g., nucleotides 599-727 and/or 2381-2839 of the nucleic acid sequence of Table 3). In embodiments, the nucleic acid molecule comprises a nucleic acid sequence having at least about 70%, 75%, 80%, 85%, 90%, 95%, 96%, 97%, 98%, 99%, or 100% sequence identity to the Anellovirus ORF1/2 nucleotide sequence of Table 3 (e.g., nucleotides 599-727 and/or 2619-2813 of the nucleic acid sequence of Table 3). In embodiments, the nucleic acid molecule comprises a nucleic acid sequence having at least about 70%, 75%, 80%, 85%, 90%, 95%, 96%, 97%, 98%, 99%, or 100% sequence identity to the Anellovirus ORF2 nucleotide sequence of Table 3 (e.g., nucleotides 357-731 of the nucleic acid sequence of Table 3). In embodiments, the nucleic acid molecule comprises a nucleic acid sequence having at least about 70%, 75%, 80%, 85%, 90%, 95%, 96%, 97%, 98%, 99%, or 100% sequence identity to the Anellovirus ORF2/2 nucleotide sequence of Table 3 (e.g., nucleotides 357-727 and/or 2381-2813 of the nucleic acid sequence of Table 3). In embodiments, the nucleic acid molecule comprises a nucleic acid sequence having at least about 70%, 75%, 80%, 85%, 90%, 95%, 96%, 97%, 98%, 99%, or 100% sequence identity to the Anellovirus ORF2/3 nucleotide sequence of Table 3 (e.g., nucleotides 357-727 and/or 2619-3021 of the nucleic acid sequence of Table 3). In embodiments, the nucleic acid molecule comprises a nucleic acid sequence having at least about 70%, 75%, 80%, 85%, 90%, 95%, 96%, 97%, 98%, 99%, or 100% sequence identity to the Anellovirus ORF2t/3 nucleotide sequence of Table 3 (e.g., nucleotides 357-406 and/or 2619-3021 of the nucleic acid sequence of Table 3). In embodiments, the nucleic acid molecule comprises a nucleic acid sequence having at least about 70%, 75%, 80%, 85%, 90%, 95%, 96%, 97%, 98%, 99%, or 100% sequence identity to the Anellovirus TATA box nucleotide sequence of Table 3 (e.g., nucleotides 89-90 of the nucleic acid sequence of Table 3). In embodiments, the nucleic acid molecule comprises a nucleic acid sequence having at least about 70%, 75%, 80%, 85%, 90%, 95%, 96%, 97%, 98%, 99%, or 100% sequence identity to the Anellovirus Cap site nucleotide sequence of Table 3 (e.g., nucleotides 107-114 of the nucleic acid sequence of Table 3). In embodiments, the nucleic acid molecule comprises a nucleic acid sequence having at least about 70%, 75%, 80%, 85%, 90%, 95%, 96%, 97%, 98%, 99%, or 100% sequence identity to the Anellovirus transcriptional start site nucleotide sequence of Table 3 (e.g., nucleotide 114 of the nucleic acid sequence of Table 3). In embodiments, the nucleic acid molecule comprises a nucleic acid sequence having at least about 70%, 75%, 80%, 85%, 90%, 95%, 96%, 97%, 98%, 99%, or 100% sequence identity to the Anellovirus 5′ UTR conserved domain nucleotide sequence of Table 3 (e.g., nucleotides 174-244 of the nucleic acid sequence of Table 3). In embodiments, the nucleic acid molecule comprises a nucleic acid sequence having at least about 70%, 75%, 80%, 85%, 90%, 95%, 96%, 97%, 98%, 99%, or 100% sequence identity to the Anellovirus three open-reading frame region nucleotide sequence of Table 3 (e.g., nucleotides 2596-2810 of the nucleic acid sequence of Table 3). In embodiments, the nucleic acid molecule comprises a nucleic acid sequence having at least about 70%, 75%, 80%, 85%, 90%, 95%, 96%, 97%, 98%, 99%, or 100% sequence identity to the Anellovirus poly(A) signal nucleotide sequence of Table 3 (e.g., nucleotides 3017-3022 of the nucleic acid sequence of Table 3). In embodiments, the nucleic acid molecule comprises a nucleic acid sequence having at least about 70%, 75%, 80%, 85%, 90%, 95%, 96%, 97%, 98%, 99%, or 100% sequence identity to the Anellovirus GC-rich nucleotide sequence of Table 3 (e.g., nucleotides 3691-3794 of the nucleic acid sequence of Table 3).

[0374] In embodiments, the nucleic acid molecule comprises a nucleic acid sequence having at least about 70%, 75%, 80%, 85%, 90%, 95%, 96%, 97%, 98%, 99%, or 100% sequence identity to the Anellovirus ORF1 nucleotide sequence of Table 5 (e.g., nucleotides 599-2830 of the nucleic acid sequence of Table 5). In embodiments, the nucleic acid molecule comprises a nucleic acid sequence having at least about 70%, 75%, 80%, 85%, 90%, 95%, 96%, 97%, 98%, 99%, or 100% sequence identity to the Anellovirus ORF1/1 nucleotide sequence of Table 5 (e.g., nucleotides 599-715 and/or 2363-2830 of the nucleic acid sequence of Table 5). In embodiments, the nucleic acid molecule comprises a nucleic acid sequence having at least about 70%, 75%, 80%, 85%, 90%, 95%, 96%, 97%, 98%, 99%, or 100% sequence identity to the Anellovirus ORF1/2 nucleotide sequence of Table 5 (e.g., nucleotides 599-715 and/or 2565-2789 of the nucleic acid sequence of Table 5). In embodiments, the nucleic acid molecule comprises a nucleic acid sequence having at least about 70%, 75%, 80%, 85%, 90%, 95%, 96%, 97%, 98%, 99%, or 100% sequence identity to the Anellovirus ORF2 nucleotide sequence of Table 5 (e.g., nucleotides 336-719 of the nucleic acid sequence of Table 5). In embodiments, the nucleic acid molecule comprises a nucleic acid sequence having at least about 70%, 75%, 80%, 85%, 90%, 95%, 96%, 97%, 98%, 99%, or 100% sequence identity to the Anellovirus ORF2/2 nucleotide sequence of Table 5 (e.g., nucleotides 336-715 and/or 2363-2789 of the nucleic acid sequence of Table 5). In embodiments, the nucleic acid molecule comprises a nucleic acid sequence having at least about 70%, 75%, 80%, 85%, 90%, 95%, 96%, 97%, 98%, 99%, or 100% sequence identity to the Anellovirus ORF2/3 nucleotide sequence of Table 5 (e.g., nucleotides 336-715 and/or 2565-3015 of the nucleic acid sequence of Table 5). In embodiments, the nucleic acid molecule comprises a nucleic acid sequence having at least about 70%, 75%, 80%, 85%, 90%, 95%, 96%, 97%, 98%, 99%, or 100% sequence identity to the Anellovirus ORF2t/3 nucleotide sequence of Table 5 (e.g., nucleotides 336-388 and/or 2565-3015 of the nucleic acid sequence of Table 5). In embodiments, the nucleic acid molecule comprises a nucleic acid sequence having at least about 70%, 75%, 80%, 85%, 90%, 95%, 96%, 97%, 98%, 99%, or 100% sequence identity to the Anellovirus TATA box nucleotide sequence of Table 5 (e.g., nucleotides 83-88 of the nucleic acid sequence of Table 5). In embodiments, the nucleic acid molecule comprises a nucleic acid sequence having at least about 70%, 75%, 80%, 85%, 90%, 95%, 96%, 97%, 98%, 99%, or 100% sequence identity to the Anellovirus Cap site nucleotide sequence of Table 5 (e.g., nucleotides 104-111 of the nucleic acid sequence of Table 5). In embodiments, the nucleic acid molecule comprises a nucleic acid sequence having at least about 70%, 75%, 80%, 85%, 90%, 95%, 96%, 97%, 98%, 99%, or 100% sequence identity to the Anellovirus transcriptional start site nucleotide sequence of Table 5 (e.g., nucleotide 111 of the nucleic acid sequence of Table 5). In embodiments, the nucleic acid molecule comprises a nucleic acid sequence having at least about 70%, 75%, 80%, 85%, 90%, 95%, 96%, 97%, 98%, 99%, or 100% sequence identity to the Anellovirus 5′ UTR conserved domain nucleotide sequence of Table 5 (e.g., nucleotides 170-240 of the nucleic acid sequence of Table 5). In embodiments, the nucleic acid molecule comprises a nucleic acid sequence having at least about 70%, 75%, 80%, 85%, 90%, 95%, 96%, 97%, 98%, 99%, or 100% sequence identity to the Anellovirus three open-reading frame region nucleotide sequence of Table 5 (e.g., nucleotides 2551-2786 of the nucleic acid sequence of Table 5). In embodiments, the nucleic acid molecule comprises a nucleic acid sequence having at least about 70%, 75%, 80%, 85%, 90%, 95%, 96%, 97%, 98%, 99%, or 100% sequence identity to the Anellovirus poly(A) signal nucleotide sequence of Table 5 (e.g., nucleotides 3011-3016 of the nucleic acid sequence of Table 5). In embodiments, the nucleic acid molecule comprises a nucleic acid sequence having at least about 70%, 75%, 80%, 85%, 90%, 95%, 96%, 97%, 98%, 99%, or 100% sequence identity to the Anellovirus GC-rich nucleotide sequence of Table 5 (e.g., nucleotides 3632-3753 of the nucleic acid sequence of Table 5).

[0375] In embodiments, the nucleic acid molecule comprises a nucleic acid sequence having at least about 70%, 75%, 80%, 85%, 90%, 95%, 96%, 97%, 98%, 99%, or 100% sequence identity to the Anellovirus ORF1 nucleotide sequence of Table 7 (e.g., nucleotides 590-2899 of the nucleic acid sequence of Table 7). In embodiments, the nucleic acid molecule comprises a nucleic acid sequence having at least about 70%, 75%, 80%, 85%, 90%, 95%, 96%, 97%, 98%, 99%, or 100% sequence identity to the Anellovirus ORF1/1 nucleotide sequence of Table 7 (e.g., nucleotides 590-712 and/or 2372-2899 of the nucleic acid sequence of Table 7). In embodiments, the nucleic acid molecule comprises a nucleic acid sequence having at least about 70%, 75%, 80%, 85%, 90%, 95%, 96%, 97%, 98%, 99%, or 100% sequence identity to the Anellovirus ORF1/2 nucleotide sequence of Table 7 (e.g., nucleotides 590-712 and/or 2565-2873 of the nucleic acid sequence of Table 7). In embodiments, the nucleic acid molecule comprises a nucleic acid sequence having at least about 70%, 75%, 80%, 85%, 90%, 95%, 96%, 97%, 98%, 99%, or 100% sequence identity to the Anellovirus ORF2 nucleotide sequence of Table 7 (e.g., nucleotides 354-716 of the nucleic acid sequence of Table 7). In embodiments, the nucleic acid molecule comprises a nucleic acid sequence having at least about 70%, 75%, 80%, 85%, 90%, 95%, 96%, 97%, 98%, 99%, or 100% sequence identity to the Anellovirus ORF2/2 nucleotide sequence of Table 7 (e.g., nucleotides 354-712 and/or 2372-2873 of the nucleic acid sequence of Table 7). In embodiments, the nucleic acid molecule comprises a nucleic acid sequence having at least about 70%, 75%, 80%, 85%, 90%, 95%, 96%, 97%, 98%, 99%, or 100% sequence identity to the Anellovirus ORF2/3 nucleotide sequence of Table 7 (e.g., nucleotides 354-712 and/or 2565-3075 of the nucleic acid sequence of Table 7). In embodiments, the nucleic acid molecule comprises a nucleic acid sequence having at least about 70%, 75%, 80%, 85%, 90%, 95%, 96%, 97%, 98%, 99%, or 100% sequence identity to the Anellovirus ORF2t/3 nucleotide sequence of Table 7 (e.g., nucleotides 354-400 and/or 2565-3075 of the nucleic acid sequence of Table 7). In embodiments, the nucleic acid molecule comprises a nucleic acid sequence having at least about 70%, 75%, 80%, 85%, 90%, 95%, 96%, 97%, 98%, 99%, or 100% sequence identity to the Anellovirus TATA box nucleotide sequence of Table 7 (e.g., nucleotides 86-90 of the nucleic acid sequence of Table 7). In embodiments, the nucleic acid molecule comprises a nucleic acid sequence having at least about 70%, 75%, 80%, 85%, 90%, 95%, 96%, 97%, 98%, 99%, or 100% sequence identity to the Anellovirus Cap site nucleotide sequence of Table 7 (e.g., nucleotides 107-114 of the nucleic acid sequence of Table 7). In embodiments, the nucleic acid molecule comprises a nucleic acid sequence having at least about 70%, 75%, 80%, 85%, 90%, 95%, 96%, 97%, 98%, 99%, or 100% sequence identity to the Anellovirus transcriptional start site nucleotide sequence of Table 7 (e.g., nucleotide 114 of the nucleic acid sequence of Table 7). In embodiments, the nucleic acid molecule comprises a nucleic acid sequence having at least about 70%, 75%, 80%, 85%, 90%, 95%, 96%, 97%, 98%, 99%, or 100% sequence identity to the Anellovirus 5′ UTR conserved domain nucleotide sequence of Table 7 (e.g., nucleotides 174-244 of the nucleic acid sequence of Table 7). In embodiments, the nucleic acid molecule comprises a nucleic acid sequence having at least about 70%, 75%, 80%, 85%, 90%, 95%, 96%, 97%, 98%, 99%, or 100% sequence identity to the Anellovirus three open-reading frame region nucleotide sequence of Table 7 (e.g., nucleotides 2551-2870 of the nucleic acid sequence of Table 7). In embodiments, the nucleic acid molecule comprises a nucleic acid sequence having at least about 70%, 75%, 80%, 85%, 90%, 95%, 96%, 97%, 98%, 99%, or 100% sequence identity to the Anellovirus poly(A) signal nucleotide sequence of Table 7 (e.g., nucleotides 3071-3076 of the nucleic acid sequence of Table 7). In embodiments, the nucleic acid molecule comprises a nucleic acid sequence having at least about 70%, 75%, 80%, 85%, 90%, 95%, 96%, 97%, 98%, 99%, or 100% sequence identity to the Anellovirus GC-rich nucleotide sequence of Table 7 (e.g., nucleotides 3733-3853 of the nucleic acid sequence of Table 7).

[0376] In embodiments, the nucleic acid molecule comprises a nucleic acid sequence having at least about 70%, 75%, 80%, 85%, 90%, 95%, 96%, 97%, 98%, 99%, or 100% sequence identity to the Anellovirus ORF1 nucleotide sequence of Table 9 (e.g., nucleotides 577-2787 of the nucleic acid sequence of Table 9). In embodiments, the nucleic acid molecule comprises a nucleic acid sequence having at least about 70%, 75%, 80%, 85%, 90%, 95%, 96%, 97%, 98%, 99%, or 100% sequence identity to the Anellovirus ORF1/1 nucleotide sequence of Table 9 (e.g., nucleotides 577-699 and/or 2311-2787 of the nucleic acid sequence of Table 9). In embodiments, the nucleic acid molecule comprises a nucleic acid sequence having at least about 70%, 75%, 80%, 85%, 90%, 95%, 96%, 97%, 98%, 99%, or 100% sequence identity to the Anellovirus ORF1/2 nucleotide sequence of Table 9 (e.g., nucleotides 577-699 and/or 2504-2806 of the nucleic acid sequence of Table 9). In embodiments, the nucleic acid molecule comprises a nucleic acid sequence having at least about 70%, 75%, 80%, 85%, 90%, 95%, 96%, 97%, 98%, 99%, or 100% sequence identity to the Anellovirus ORF2 nucleotide sequence of Table 9 (e.g., nucleotides 341-703 of the nucleic acid sequence of Table 9). In embodiments, the nucleic acid molecule comprises a nucleic acid sequence having at least about 70%, 75%, 80%, 85%, 90%, 95%, 96%, 97%, 98%, 99%, or 100% sequence identity to the Anellovirus ORF2/2 nucleotide sequence of Table 9 (e.g., nucleotides 341-699 and/or 2311-2806 of the nucleic acid sequence of Table 9). In embodiments, the nucleic acid molecule comprises a nucleic acid sequence having at least about 70%, 75%, 80%, 85%, 90%, 95%, 96%, 97%, 98%, 99%, or 100% sequence identity to the Anellovirus ORF2/3 nucleotide sequence of Table 9 (e.g., nucleotides 341-699 and/or 2504-2978 of the nucleic acid sequence of Table 9). In embodiments, the nucleic acid molecule comprises a nucleic acid sequence having at least about 70%, 75%, 80%, 85%, 90%, 95%, 96%, 97%, 98%, 99%, or 100% sequence identity to the Anellovirus ORF2t/3 nucleotide sequence of Table 9 (e.g., nucleotides 341-387 and/or 2504-2978 of the nucleic acid sequence of Table 9). In embodiments, the nucleic acid molecule comprises a nucleic acid sequence having at least about 70%, 75%, 80%, 85%, 90%, 95%, 96%, 97%, 98%, 99%, or 100% sequence identity to the Anellovirus TATA box nucleotide sequence of Table 9 (e.g., nucleotides 83-87 of the nucleic acid sequence of Table 9). In embodiments, the nucleic acid molecule comprises a nucleic acid sequence having at least about 70%, 75%, 80%, 85%, 90%, 95%, 96%, 97%, 98%, 99%, or 100% sequence identity to the Anellovirus Cap site nucleotide sequence of Table 9 (e.g., nucleotides 104-111 of the nucleic acid sequence of Table 9). In embodiments, the nucleic acid molecule comprises a nucleic acid sequence having at least about 70%, 75%, 80%, 85%, 90%, 95%, 96%, 97%, 98%, 99%, or 100% sequence identity to the Anellovirus transcriptional start site nucleotide sequence of Table 9 (e.g., nucleotide 111 of the nucleic acid sequence of Table 9). In embodiments, the nucleic acid molecule comprises a nucleic acid sequence having at least about 70%, 75%, 80%, 85%, 90%, 95%, 96%, 97%, 98%, 99%, or 100% sequence identity to the Anellovirus 5′ UTR conserved domain nucleotide sequence of Table 9 (e.g., nucleotides 171-241 of the nucleic acid sequence of Table 9). In embodiments, the nucleic acid molecule comprises a nucleic acid sequence having at least about 70%, 75%, 80%, 85%, 90%, 95%, 96%, 97%, 98%, 99%, or 100% sequence identity to the Anellovirus three open-reading frame region nucleotide sequence of Table 9 (e.g., nucleotides 2463-2784 of the nucleic acid sequence of Table 9). In embodiments, the nucleic acid molecule comprises a nucleic acid sequence having at least about 70%, 75%, 80%, 85%, 90%, 95%, 96%, 97%, 98%, 99%, or 100% sequence identity to the Anellovirus poly(A) signal nucleotide sequence of Table 9 (e.g., nucleotides 2974-2979 of the nucleic acid sequence of Table 9). In embodiments, the nucleic acid molecule comprises a nucleic acid sequence having at least about 70%, 75%, 80%, 85%, 90%, 95%, 96%, 97%, 98%, 99%, or 100% sequence identity to the Anellovirus GC-rich nucleotide sequence of Table 9 (e.g., nucleotides 3644-3758 of the nucleic acid sequence of Table 9).

[0377] In embodiments, the nucleic acid molecule comprises a nucleic acid sequence having at least about 70%, 75%, 80%, 85%, 90%, 95%, 96%, 97%, 98%, 99%, or 100% sequence identity to the Anellovirus ORF1 nucleotide sequence of Table 11 (e.g., nucleotides 612-2612 of the nucleic acid sequence of Table 11). In embodiments, the nucleic acid molecule comprises a nucleic acid sequence having at least about 70%, 75%, 80%, 85%, 90%, 95%, 96%, 97%, 98%, 99%, or 100% sequence identity to the Anellovirus ORF1/1 nucleotide sequence of Table 11 (e.g., nucleotides 612-719 and/or 2274-2612 of the nucleic acid sequence of Table 11). In embodiments, the nucleic acid molecule comprises a nucleic acid sequence having at least about 70%, 75%, 80%, 85%, 90%, 95%, 96%, 97%, 98%, 99%, or 100% sequence identity to the Anellovirus ORF1/2 nucleotide sequence of Table 11 (e.g., nucleotides 612-719 and/or 2449-2589 of the nucleic acid sequence of Table 11). In embodiments, the nucleic acid molecule comprises a nucleic acid sequence having at least about 70%, 75%, 80%, 85%, 90%, 95%, 96%, 97%, 98%, 99%, or 100% sequence identity to the Anellovirus ORF2 nucleotide sequence of Table 11 (e.g., nucleotides 424-723 of the nucleic acid sequence of Table 11). In embodiments, the nucleic acid molecule comprises a nucleic acid sequence having at least about 70%, 75%, 80%, 85%, 90%, 95%, 96%, 97%, 98%, 99%, or 100% sequence identity to the Anellovirus ORF2/2 nucleotide sequence of Table 11 (e.g., nucleotides 424-719 and/or 2274-2589 of the nucleic acid sequence of Table 11). In embodiments, the nucleic acid molecule comprises a nucleic acid sequence having at least about 70%, 75%, 80%, 85%, 90%, 95%, 96%, 97%, 98%, 99%, or 100% sequence identity to the Anellovirus ORF2/3 nucleotide sequence of Table 11 (e.g., nucleotides 424-719 and/or 2449-2812 of the nucleic acid sequence of Table 11). In embodiments, the nucleic acid molecule comprises a nucleic acid sequence having at least about 70%, 75%, 80%, 85%, 90%, 95%, 96%, 97%, 98%, 99%, or 100% sequence identity to the Anellovirus TATA box nucleotide sequence of Table 11 (e.g., nucleotides 237-243 of the nucleic acid sequence of Table 11). In embodiments, the nucleic acid molecule comprises a nucleic acid sequence having at least about 70%, 75%, 80%, 85%, 90%, 95%, 96%, 97%, 98%, 99%, or 100% sequence identity to the Anellovirus Cap site nucleotide sequence of Table 11 (e.g., nucleotides 260-267 of the nucleic acid sequence of Table 11). In embodiments, the nucleic acid molecule comprises a nucleic acid sequence having at least about 70%, 75%, 80%, 85%, 90%, 95%, 96%, 97%, 98%, 99%, or 100% sequence identity to the Anellovirus transcriptional start site nucleotide sequence of Table 11 (e.g., nucleotide 267 of the nucleic acid sequence of Table 11). In embodiments, the nucleic acid molecule comprises a nucleic acid sequence having at least about 70%, 75%, 80%, 85%, 90%, 95%, 96%, 97%, 98%, 99%, or 100% sequence identity to the Anellovirus 5′ UTR conserved domain nucleotide sequence of Table 11 (e.g., nucleotides 323-393 of the nucleic acid sequence of Table 11). In embodiments, the nucleic acid molecule comprises a nucleic acid sequence having at least about 70%, 75%, 80%, 85%, 90%, 95%, 96%, 97%, 98%, 99%, or 100% sequence identity to the Anellovirus three open-reading frame region nucleotide sequence of Table 11 (e.g., nucleotides 2441-2586 of the nucleic acid sequence of Table 11). In embodiments, the nucleic acid molecule comprises a nucleic acid sequence having at least about 70%, 75%, 80%, 85%, 90%, 95%, 96%, 97%, 98%, 99%, or 100% sequence identity to the Anellovirus poly(A) signal nucleotide sequence of Table 11 (e.g., nucleotides 2808-2813 of the nucleic acid sequence of Table 11). In embodiments, the nucleic acid molecule comprises a nucleic acid sequence having at least about 70%, 75%, 80%, 85%, 90%, 95%, 96%, 97%, 98%, 99%, or 100% sequence identity to the Anellovirus GC-rich nucleotide sequence of Table 11 (e.g., nucleotides 2868-2929 of the nucleic acid sequence of Table 11).

[0378] In embodiments, the nucleic acid molecule comprises a nucleic acid sequence having at least about 70%, 75%, 80%, 85%, 90%, 95%, 96%, 97%, 98%, 99%, or 100% sequence identity to the Anellovirus ORF1 nucleotide sequence of Table 13 (e.g., nucleotides 432-2453 of the nucleic acid sequence of Table 13). In embodiments, the nucleic acid molecule comprises a nucleic acid sequence having at least about 70%, 75%, 80%, 85%, 90%, 95%, 96%, 97%, 98%, 99%, or 100% sequence identity to the Anellovirus ORF1/1 nucleotide sequence of Table 13 (e.g., nucleotides 432-584 and/or 1977-2453 of the nucleic acid sequence of Table 13). In embodiments, the nucleic acid molecule comprises a nucleic acid sequence having at least about 70%, 75%, 80%, 85%, 90%, 95%, 96%, 97%, 98%, 99%, or 100% sequence identity to the Anellovirus ORF1/2 nucleotide sequence of Table 13 (e.g., nucleotides 432-584 and/or 2197-2388 of the nucleic acid sequence of Table 13). In embodiments, the nucleic acid molecule comprises a nucleic acid sequence having at least about 70%, 75%, 80%, 85%, 90%, 95%, 96%, 97%, 98%, 99%, or 100% sequence identity to the Anellovirus ORF2 nucleotide sequence of Table 13 (e.g., nucleotides 283-588 of the nucleic acid sequence of Table 13). In embodiments, the nucleic acid molecule comprises a nucleic acid sequence having at least about 70%, 75%, 80%, 85%, 90%, 95%, 96%, 97%, 98%, 99%, or 100% sequence identity to the Anellovirus ORF2/2 nucleotide sequence of Table 13 (e.g., nucleotides 283-584 and/or 1977-2388 of the nucleic acid sequence of Table 13). In embodiments, the nucleic acid molecule comprises a nucleic acid sequence having at least about 70%, 75%, 80%, 85%, 90%, 95%, 96%, 97%, 98%, 99%, or 100% sequence identity to the Anellovirus ORF2/3 nucleotide sequence of Table 13 (e.g., nucleotides 283-584 and/or 2197-2614 of the nucleic acid sequence of Table 13). In embodiments, the nucleic acid molecule comprises a nucleic acid sequence having at least about 70%, 75%, 80%, 85%, 90%, 95%, 96%, 97%, 98%, 99%, or 100% sequence identity to the Anellovirus TATA box nucleotide sequence of Table 13 (e.g., nucleotides 21-25 of the nucleic acid sequence of Table 13). In embodiments, the nucleic acid molecule comprises a nucleic acid sequence having at least about 70%, 75%, 80%, 85%, 90%, 95%, 96%, 97%, 98%, 99%, or 100% sequence identity to the Anellovirus Cap site nucleotide sequence of Table 13 (e.g., nucleotides 42-49 of the nucleic acid sequence of Table 13). In embodiments, the nucleic acid molecule comprises a nucleic acid sequence having at least about 70%, 75%, 80%, 85%, 90%, 95%, 96%, 97%, 98%, 99%, or 100% sequence identity to the Anellovirus transcriptional start site nucleotide sequence of Table 13 (e.g., nucleotide 49 of the nucleic acid sequence of Table 13). In embodiments, the nucleic acid molecule comprises a nucleic acid sequence having at least about 70%, 75%, 80%, 85%, 90%, 95%, 96%, 97%, 98%, 99%, or 100% sequence identity to the Anellovirus 5′ UTR conserved domain nucleotide sequence of Table 13 (e.g., nucleotides 117-187 of the nucleic acid sequence of Table 13). In embodiments, the nucleic acid molecule comprises a nucleic acid sequence having at least about 70%, 75%, 80%, 85%, 90%, 95%, 96%, 97%, 98%, 99%, or 100% sequence identity to the Anellovirus three open-reading frame region nucleotide sequence of Table 13 (e.g., nucleotides 2186-2385 of the nucleic acid sequence of Table 13). In embodiments, the nucleic acid molecule comprises a nucleic acid sequence having at least about 70%, 75%, 80%, 85%, 90%, 95%, 96%, 97%, 98%, 99%, or 100% sequence identity to the Anellovirus poly(A) signal nucleotide sequence of Table 13 (e.g., nucleotides 2676-2681 of the nucleic acid sequence of Table 13). In embodiments, the nucleic acid molecule comprises a nucleic acid sequence having at least about 70%, 75%, 80%, 85%, 90%, 95%, 96%, 97%, 98%, 99%, or 100% sequence identity to the Anellovirus GC-rich nucleotide sequence of Table 13 (e.g., nucleotides 3054-3172 of the nucleic acid sequence of Table 13).

[0379] In embodiments, the nucleic acid molecule comprises a nucleic acid sequence encoding an amino acid sequence having at least about 70%, 75%, 80%, 85%, 90%, 95%, 96%, 97%, 98%, 99%, or 100% sequence identity to the Anellovirus ORF1 amino acid sequence of Table 2. In embodiments, the nucleic acid molecule comprises a nucleic acid sequence encoding an amino acid sequence having at least about 70%, 75%, 80%, 85%, 90%, 95%, 96%, 97%, 98%, 99%, or 100% sequence identity to the Anellovirus ORF1/1 amino acid sequence of Table 2. In embodiments, the nucleic acid molecule comprises a nucleic acid sequence encoding an amino acid sequence having at least about 70%, 75%, 80%, 85%, 90%, 95%, 96%, 97%, 98%, 99%, or 100% sequence identity to the Anellovirus ORF1/2 amino acid sequence of Table 2. In embodiments, the nucleic acid molecule comprises a nucleic acid sequence encoding an amino acid sequence having at least about 70%, 75%, 80%, 85%, 90%, 95%, 96%, 97%, 98%, 99%, or 100% sequence identity to the Anellovirus ORF2 amino acid sequence of Table 2. In embodiments, the nucleic acid molecule comprises a nucleic acid sequence encoding an amino acid sequence having at least about 70%, 75%, 80%, 85%, 90%, 95%, 96%, 97%, 98%, 99%, or 100% sequence identity to the Anellovirus ORF2/2 amino acid sequence of Table 2. In embodiments, the nucleic acid molecule comprises a nucleic acid sequence encoding an amino acid sequence having at least about 70%, 75%, 80%, 85%, 90%, 95%, 96%, 97%, 98%, 99%, or 100% sequence identity to the Anellovirus ORF2/3 amino acid sequence of Table 2. In embodiments, the nucleic acid molecule comprises a nucleic acid sequence encoding an amino acid sequence having at least about 70%, 75%, 80%, 85%, 90%, 95%, 96%, 97%, 98%, 99%, or 100% sequence identity to the Anellovirus ORF2t/3 amino acid sequence of Table 2.

[0380] In embodiments, the nucleic acid molecule comprises a nucleic acid sequence encoding an amino acid sequence having at least about 70%, 75%, 80%, 85%, 90%, 95%, 96%, 97%, 98%, 99%, or 100% sequence identity to the Anellovirus ORF1 amino acid sequence of Table 4. In embodiments, the nucleic acid molecule comprises a nucleic acid sequence encoding an amino acid sequence having at least about 70%, 75%, 80%, 85%, 90%, 95%, 96%, 97%, 98%, 99%, or 100% sequence identity to the Anellovirus ORF1/1 amino acid sequence of Table 4. In embodiments, the nucleic acid molecule comprises a nucleic acid sequence encoding an amino acid sequence having at least about 70%, 75%, 80%, 85%, 90%, 95%, 96%, 97%, 98%, 99%, or 100% sequence identity to the Anellovirus ORF1/2 amino acid sequence of Table 4. In embodiments, the nucleic acid molecule comprises a nucleic acid sequence encoding an amino acid sequence having at least about 70%, 75%, 80%, 85%, 90%, 95%, 96%, 97%, 98%, 99%, or 100% sequence identity to the Anellovirus ORF2 amino acid sequence of Table 4. In embodiments, the nucleic acid molecule comprises a nucleic acid sequence encoding an amino acid sequence having at least about 70%, 75%, 80%, 85%, 90%, 95%, 96%, 97%, 98%, 99%, or 100% sequence identity to the Anellovirus ORF2/2 amino acid sequence of Table 4. In embodiments, the nucleic acid molecule comprises a nucleic acid sequence encoding an amino acid sequence having at least about 70%, 75%, 80%, 85%, 90%, 95%, 96%, 97%, 98%, 99%, or 100% sequence identity to the Anellovirus ORF2/3 amino acid sequence of Table 4. In embodiments, the nucleic acid molecule comprises a nucleic acid sequence encoding an amino acid sequence having at least about 70%, 75%, 80%, 85%, 90%, 95%, 96%, 97%, 98%, 99%, or 100% sequence identity to the Anellovirus ORF2t/3 amino acid sequence of Table 4.

[0381] In embodiments, the nucleic acid molecule comprises a nucleic acid sequence encoding an amino acid sequence having at least about 70%, 75%, 80%, 85%, 90%, 95%, 96%, 97%, 98%, 99%, or 100% sequence identity to the Anellovirus ORF1 amino acid sequence of Table 6. In embodiments, the nucleic acid molecule comprises a nucleic acid sequence encoding an amino acid sequence having at least about 70%, 75%, 80%, 85%, 90%, 95%, 96%, 97%, 98%, 99%, or 100% sequence identity to the Anellovirus ORF1/1 amino acid sequence of Table 6. In embodiments, the nucleic acid molecule comprises a nucleic acid sequence encoding an amino acid sequence having at least about 70%, 75%, 80%, 85%, 90%, 95%, 96%, 97%, 98%, 99%, or 100% sequence identity to the Anellovirus ORF1/2 amino acid sequence of Table 6. In embodiments, the nucleic acid molecule comprises a nucleic acid sequence encoding an amino acid sequence having at least about 70%, 75%, 80%, 85%, 90%, 95%, 96%, 97%, 98%, 99%, or 100% sequence identity to the Anellovirus ORF2 amino acid sequence of Table 6. In embodiments, the nucleic acid molecule comprises a nucleic acid sequence encoding an amino acid sequence having at least about 70%, 75%, 80%, 85%, 90%, 95%, 96%, 97%, 98%, 99%, or 100% sequence identity to the Anellovirus ORF2/2 amino acid sequence of Table 6. In embodiments, the nucleic acid molecule comprises a nucleic acid sequence encoding an amino acid sequence having at least about 70%, 75%, 80%, 85%, 90%, 95%, 96%, 97%, 98%, 99%, or 100% sequence identity to the Anellovirus ORF2/3 amino acid sequence of Table 6. In embodiments, the nucleic acid molecule comprises a nucleic acid sequence encoding an amino acid sequence having at least about 70%, 75%, 80%, 85%, 90%, 95%, 96%, 97%, 98%, 99%, or 100% sequence identity to the Anellovirus ORF2t/3 amino acid sequence of Table 6.

[0382] In embodiments, the nucleic acid molecule comprises a nucleic acid sequence encoding an amino acid sequence having at least about 70%, 75%, 80%, 85%, 90%, 95%, 96%, 97%, 98%, 99%, or 100% sequence identity to the Anellovirus ORF1 amino acid sequence of Table 8. In embodiments, the nucleic acid molecule comprises a nucleic acid sequence encoding an amino acid sequence having at least about 70%, 75%, 80%, 85%, 90%, 95%, 96%, 97%, 98%, 99%, or 100% sequence identity to the Anellovirus ORF1/1 amino acid sequence of Table 8. In embodiments, the nucleic acid molecule comprises a nucleic acid sequence encoding an amino acid sequence having at least about 70%, 75%, 80%, 85%, 90%, 95%, 96%, 97%, 98%, 99%, or 100% sequence identity to the Anellovirus ORF1/2 amino acid sequence of Table 8. In embodiments, the nucleic acid molecule comprises a nucleic acid sequence encoding an amino acid sequence having at least about 70%, 75%, 80%, 85%, 90%, 95%, 96%, 97%, 98%, 99%, or 100% sequence identity to the Anellovirus ORF2 amino acid sequence of Table 8. In embodiments, the nucleic acid molecule comprises a nucleic acid sequence encoding an amino acid sequence having at least about 70%, 75%, 80%, 85%, 90%, 95%, 96%, 97%, 98%, 99%, or 100% sequence identity to the Anellovirus ORF2/2 amino acid sequence of Table 8. In embodiments, the nucleic acid molecule comprises a nucleic acid sequence encoding an amino acid sequence having at least about 70%, 75%, 80%, 85%, 90%, 95%, 96%, 97%, 98%, 99%, or 100% sequence identity to the Anellovirus ORF2/3 amino acid sequence of Table 8. In embodiments, the nucleic acid molecule comprises a nucleic acid sequence encoding an amino acid sequence having at least about 70%, 75%, 80%, 85%, 90%, 95%, 96%, 97%, 98%, 99%, or 100% sequence identity to the Anellovirus ORF2t/3 amino acid sequence of Table 8.

[0383] In embodiments, the nucleic acid molecule comprises a nucleic acid sequence encoding an amino acid sequence having at least about 70%, 75%, 80%, 85%, 90%, 95%, 96%, 97%, 98%, 99%, or 100% sequence identity to the Anellovirus ORF1 amino acid sequence of Table 10. In embodiments, the nucleic acid molecule comprises a nucleic acid sequence encoding an amino acid sequence having at least about 70%, 75%, 80%, 85%, 90%, 95%, 96%, 97%, 98%, 99%, or 100% sequence identity to the Anellovirus ORF1/1 amino acid sequence of Table 10. In embodiments, the nucleic acid molecule comprises a nucleic acid sequence encoding an amino acid sequence having at least about 70%, 75%, 80%, 85%, 90%, 95%, 96%, 97%, 98%, 99%, or 100% sequence identity to the Anellovirus ORF1/2 amino acid sequence of Table 10. In embodiments, the nucleic acid molecule comprises a nucleic acid sequence encoding an amino acid sequence having at least about 70%, 75%, 80%, 85%, 90%, 95%, 96%, 97%, 98%, 99%, or 100% sequence identity to the Anellovirus ORF2 amino acid sequence of Table 10. In embodiments, the nucleic acid molecule comprises a nucleic acid sequence encoding an amino acid sequence having at least about 70%, 75%, 80%, 85%, 90%, 95%, 96%, 97%, 98%, 99%, or 100% sequence identity to the Anellovirus ORF2/2 amino acid sequence of Table 10. In embodiments, the nucleic acid molecule comprises a nucleic acid sequence encoding an amino acid sequence having at least about 70%, 75%, 80%, 85%, 90%, 95%, 96%, 97%, 98%, 99%, or 100% sequence identity to the Anellovirus ORF2/3 amino acid sequence of Table 10. In embodiments, the nucleic acid molecule comprises a nucleic acid sequence encoding an amino acid sequence having at least about 70%, 75%, 80%, 85%, 90%, 95%, 96%, 97%, 98%, 99%, or 100% sequence identity to the Anellovirus ORF2t/3 amino acid sequence of Table 10.

[0384] In embodiments, the nucleic acid molecule comprises a nucleic acid sequence encoding an amino acid sequence having at least about 70%, 75%, 80%, 85%, 90%, 95%, 96%, 97%, 98%, 99%, or 100% sequence identity to the Anellovirus ORF1 amino acid sequence of Table 12. In embodiments, the nucleic acid molecule comprises a nucleic acid sequence encoding an amino acid sequence having at least about 70%, 75%, 80%, 85%, 90%, 95%, 96%, 97%, 98%, 99%, or 100% sequence identity to the Anellovirus ORF1/1 amino acid sequence of Table 12. In embodiments, the nucleic acid molecule comprises a nucleic acid sequence encoding an amino acid sequence having at least about 70%, 75%, 80%, 85%, 90%, 95%, 96%, 97%, 98%, 99%, or 100% sequence identity to the Anellovirus ORF1/2 amino acid sequence of Table 12. In embodiments, the nucleic acid molecule comprises a nucleic acid sequence encoding an amino acid sequence having at least about 70%, 75%, 80%, 85%, 90%, 95%, 96%, 97%, 98%, 99%, or 100% sequence identity to the Anellovirus ORF2 amino acid sequence of Table 12. In embodiments, the nucleic acid molecule comprises a nucleic acid sequence encoding an amino acid sequence having at least about 70%, 75%, 80%, 85%, 90%, 95%, 96%, 97%, 98%, 99%, or 100% sequence identity to the Anellovirus ORF2/2 amino acid sequence of Table 12. In embodiments, the nucleic acid molecule comprises a nucleic acid sequence encoding an amino acid sequence having at least about 70%, 75%, 80%, 85%, 90%, 95%, 96%, 97%, 98%, 99%, or 100% sequence identity to the Anellovirus ORF2/3 amino acid sequence of Table 12.

[0385] In embodiments, the nucleic acid molecule comprises a nucleic acid sequence encoding an amino acid sequence having at least about 70%, 75%, 80%, 85%, 90%, 95%, 96%, 97%, 98%, 99%, or 100% sequence identity to the Anellovirus ORF1 amino acid sequence of Table 14. In embodiments, the nucleic acid molecule comprises a nucleic acid sequence encoding an amino acid sequence having at least about 70%, 75%, 80%, 85%, 90%, 95%, 96%, 97%, 98%, 99%, or 100% sequence identity to the Anellovirus ORF1/1 amino acid sequence of Table 14. In embodiments, the nucleic acid molecule comprises a nucleic acid sequence encoding an amino acid sequence having at least about 70%, 75%, 80%, 85%, 90%, 95%, 96%, 97%, 98%, 99%, or 100% sequence identity to the Anellovirus ORF1/2 amino acid sequence of Table 14. In embodiments, the nucleic acid molecule comprises a nucleic acid sequence encoding an amino acid sequence having at least about 70%, 75%, 80%, 85%, 90%, 95%, 96%, 97%, 98%, 99%, or 100% sequence identity to the Anellovirus ORF2 amino acid sequence of Table 14. In embodiments, the nucleic acid molecule comprises a nucleic acid sequence encoding an amino acid sequence having at least about 70%, 75%, 80%, 85%, 90%, 95%, 96%, 97%, 98%, 99%, or 100% sequence identity to the Anellovirus ORF2/2 amino acid sequence of Table 14. In embodiments, the nucleic acid molecule comprises a nucleic acid sequence encoding an amino acid sequence having at least about 70%, 75%, 80%, 85%, 90%, 95%, 96%, 97%, 98%, 99%, or 100% sequence identity to the Anellovirus ORF2/3 amino acid sequence of Table 14.

[0386] In embodiments, the curon described herein comprises a protein having an amino acid sequence having at least about 70%, 75%, 80%, 85%, 90%, 95%, 96%, 97%, 98%, 99%, or 100% sequence identity to the Anellovirus ORF1 amino acid sequence of Table 2. In embodiments, the curon described herein comprises a protein having an amino acid sequence having at least about 70%, 75%, 80%, 85%, 90%, 95%, 96%, 97%, 98%, 99%, or 100% sequence identity to the Anellovirus ORF1/1 amino acid sequence of Table 2. In embodiments, the curon described herein comprises a protein having an amino acid sequence having at least about 70%, 75%, 80%, 85%, 90%, 95%, 96%, 97%, 98%, 99%, or 100% sequence identity to the Anellovirus ORF1/2 amino acid sequence of Table 2. In embodiments, the curon described herein comprises a protein having an amino acid sequence having at least about 70%, 75%, 80%, 85%, 90%, 95%, 96%, 97%, 98%, 99%, or 100% sequence identity to the Anellovirus ORF2 amino acid sequence of Table 2. In embodiments, the curon described herein comprises a protein having an amino acid sequence having at least about 70%, 75%, 80%, 85%, 90%, 95%, 96%, 97%, 98%, 99%, or 100% sequence identity to the Anellovirus ORF2/2 amino acid sequence of Table 2. In embodiments, the curon described herein comprises a protein having an amino acid sequence having at least about 70%, 75%, 80%, 85%, 90%, 95%, 96%, 97%, 98%, 99%, or 100% sequence identity to the Anellovirus ORF2/3 amino acid sequence of Table 2. In embodiments, the curon described herein comprises a protein having an amino acid sequence having at least about 70%, 75%, 80%, 85%, 90%, 95%, 96%, 97%, 98%, 99%, or 100% sequence identity to the Anellovirus ORF2t/3 amino acid sequence of Table 2.

[0387] In embodiments, the curon described herein comprises a protein having an amino acid sequence having at least about 70%, 75%, 80%, 85%, 90%, 95%, 96%, 97%, 98%, 99%, or 100% sequence identity to the Anellovirus ORF1 amino acid sequence of Table 4. In embodiments, the curon described herein comprises a protein having an amino acid sequence having at least about 70%, 75%, 80%, 85%, 90%, 95%, 96%, 97%, 98%, 99%, or 100% sequence identity to the Anellovirus ORF1/1 amino acid sequence of Table 4. In embodiments, the curon described herein comprises a protein having an amino acid sequence having at least about 70%, 75%, 80%, 85%, 90%, 95%, 96%, 97%, 98%, 99%, or 100% sequence identity to the Anellovirus ORF1/2 amino acid sequence of Table 4. In embodiments, the curon described herein comprises a protein having an amino acid sequence having at least about 70%, 75%, 80%, 85%, 90%, 95%, 96%, 97%, 98%, 99%, or 100% sequence identity to the Anellovirus ORF2 amino acid sequence of Table 4. In embodiments, the curon described herein comprises a protein having an amino acid sequence having at least about 70%, 75%, 80%, 85%, 90%, 95%, 96%, 97%, 98%, 99%, or 100% sequence identity to the Anellovirus ORF2/2 amino acid sequence of Table 4. In embodiments, the curon described herein comprises a protein having an amino acid sequence having at least about 70%, 75%, 80%, 85%, 90%, 95%, 96%, 97%, 98%, 99%, or 100% sequence identity to the Anellovirus ORF2/3 amino acid sequence of Table 4. In embodiments, the curon described herein comprises a protein having an amino acid sequence having at least about 70%, 75%, 80%, 85%, 90%, 95%, 96%, 97%, 98%, 99%, or 100% sequence identity to the Anellovirus ORF2t/3 amino acid sequence of Table 4.

[0388] In embodiments, the curon described herein comprises a protein having an amino acid sequence having at least about 70%, 75%, 80%, 85%, 90%, 95%, 96%, 97%, 98%, 99%, or 100% sequence identity to the Anellovirus ORF1 amino acid sequence of Table 6. In embodiments, the curon described herein comprises a protein having an amino acid sequence having at least about 70%, 75%, 80%, 85%, 90%, 95%, 96%, 97%, 98%, 99%, or 100% sequence identity to the Anellovirus ORF1/1 amino acid sequence of Table 6. In embodiments, the curon described herein comprises a protein having an amino acid sequence having at least about 70%, 75%, 80%, 85%, 90%, 95%, 96%, 97%, 98%, 99%, or 100% sequence identity to the Anellovirus ORF1/2 amino acid sequence of Table 6. In embodiments, the curon described herein comprises a protein having an amino acid sequence having at least about 70%, 75%, 80%, 85%, 90%, 95%, 96%, 97%, 98%, 99%, or 100% sequence identity to the Anellovirus ORF2 amino acid sequence of Table 6. In embodiments, the curon described herein comprises a protein having an amino acid sequence having at least about 70%, 75%, 80%, 85%, 90%, 95%, 96%, 97%, 98%, 99%, or 100% sequence identity to the Anellovirus ORF2/2 amino acid sequence of Table 6. In embodiments, the curon described herein comprises a protein having an amino acid sequence having at least about 70%, 75%, 80%, 85%, 90%, 95%, 96%, 97%, 98%, 99%, or 100% sequence identity to the Anellovirus ORF2/3 amino acid sequence of Table 6. In embodiments, the curon described herein comprises a protein having an amino acid sequence having at least about 70%, 75%, 80%, 85%, 90%, 95%, 96%, 97%, 98%, 99%, or 100% sequence identity to the Anellovirus ORF2t/3 amino acid sequence of Table 6.

[0389] In embodiments, the curon described herein comprises a protein having an amino acid sequence having at least about 70%, 75%, 80%, 85%, 90%, 95%, 96%, 97%, 98%, 99%, or 100% sequence identity to the Anellovirus ORF1 amino acid sequence of Table 8. In embodiments, the curon described herein comprises a protein having an amino acid sequence having at least about 70%, 75%, 80%, 85%, 90%, 95%, 96%, 97%, 98%, 99%, or 100% sequence identity to the Anellovirus ORF1/1 amino acid sequence of Table 8. In embodiments, the curon described herein comprises a protein having an amino acid sequence having at least about 70%, 75%, 80%, 85%, 90%, 95%, 96%, 97%, 98%, 99%, or 100% sequence identity to the Anellovirus ORF1/2 amino acid sequence of Table 8. In embodiments, the curon described herein comprises a protein having an amino acid sequence having at least about 70%, 75%, 80%, 85%, 90%, 95%, 96%, 97%, 98%, 99%, or 100% sequence identity to the Anellovirus ORF2 amino acid sequence of Table 8. In embodiments, the curon described herein comprises a protein having an amino acid sequence having at least about 70%, 75%, 80%, 85%, 90%, 95%, 96%, 97%, 98%, 99%, or 100% sequence identity to the Anellovirus ORF2/2 amino acid sequence of Table 8. In embodiments, the curon described herein comprises a protein having an amino acid sequence having at least about 70%, 75%, 80%, 85%, 90%, 95%, 96%, 97%, 98%, 99%, or 100% sequence identity to the Anellovirus ORF2/3 amino acid sequence of Table 8. In embodiments, the curon described herein comprises a protein having an amino acid sequence having at least about 70%, 75%, 80%, 85%, 90%, 95%, 96%, 97%, 98%, 99%, or 100% sequence identity to the Anellovirus ORF2t/3 amino acid sequence of Table 8.

[0390] In embodiments, the curon described herein comprises a protein having an amino acid sequence having at least about 70%, 75%, 80%, 85%, 90%, 95%, 96%, 97%, 98%, 99%, or 100% sequence identity to the Anellovirus ORF1 amino acid sequence of Table 10. In embodiments, the curon described herein comprises a protein having an amino acid sequence having at least about 70%, 75%, 80%, 85%, 90%, 95%, 96%, 97%, 98%, 99%, or 100% sequence identity to the Anellovirus ORF1/1 amino acid sequence of Table 10. In embodiments, the curon described herein comprises a protein having an amino acid sequence having at least about 70%, 75%, 80%, 85%, 90%, 95%, 96%, 97%, 98%, 99%, or 100% sequence identity to the Anellovirus ORF1/2 amino acid sequence of Table 10. In embodiments, the curon described herein comprises a protein having an amino acid sequence having at least about 70%, 75%, 80%, 85%, 90%, 95%, 96%, 97%, 98%, 99%, or 100% sequence identity to the Anellovirus ORF2 amino acid sequence of Table 10. In embodiments, the curon described herein comprises a protein having an amino acid sequence having at least about 70%, 75%, 80%, 85%, 90%, 95%, 96%, 97%, 98%, 99%, or 100% sequence identity to the Anellovirus ORF2/2 amino acid sequence of Table 10. In embodiments, the curon described herein comprises a protein having an amino acid sequence having at least about 70%, 75%, 80%, 85%, 90%, 95%, 96%, 97%, 98%, 99%, or 100% sequence identity to the Anellovirus ORF2/3 amino acid sequence of Table 10. In embodiments, the curon described herein comprises a protein having an amino acid sequence having at least about 70%, 75%, 80%, 85%, 90%, 95%, 96%, 97%, 98%, 99%, or 100% sequence identity to the Anellovirus ORF2t/3 amino acid sequence of Table 10.

[0391] In embodiments, the curon described herein comprises a protein having an amino acid sequence having at least about 70%, 75%, 80%, 85%, 90%, 95%, 96%, 97%, 98%, 99%, or 100% sequence identity to the Anellovirus ORF1 amino acid sequence of Table 12. In embodiments, the curon described herein comprises a protein having an amino acid sequence having at least about 70%, 75%, 80%, 85%, 90%, 95%, 96%, 97%, 98%, 99%, or 100% sequence identity to the Anellovirus ORF1/1 amino acid sequence of Table 12. In embodiments, the curon described herein comprises a protein having an amino acid sequence having at least about 70%, 75%, 80%, 85%, 90%, 95%, 96%, 97%, 98%, 99%, or 100% sequence identity to the Anellovirus ORF1/2 amino acid sequence of Table 12. In embodiments, the curon described herein comprises a protein having an amino acid sequence having at least about 70%, 75%, 80%, 85%, 90%, 95%, 96%, 97%, 98%, 99%, or 100% sequence identity to the Anellovirus ORF2 amino acid sequence of Table 12. In embodiments, the curon described herein comprises a protein having an amino acid sequence having at least about 70%, 75%, 80%, 85%, 90%, 95%, 96%, 97%, 98%, 99%, or 100% sequence identity to the Anellovirus ORF2/2 amino acid sequence of Table 12. In embodiments, the curon described herein comprises a protein having an amino acid sequence having at least about 70%, 75%, 80%, 85%, 90%, 95%, 96%, 97%, 98%, 99%, or 100% sequence identity to the Anellovirus ORF2/3 amino acid sequence of Table 12.

[0392] In embodiments, the curon described herein comprises a protein having an amino acid sequence having at least about 70%, 75%, 80%, 85%, 90%, 95%, 96%, 97%, 98%, 99%, or 100% sequence identity to the Anellovirus ORF1 amino acid sequence of Table 14. In embodiments, the curon described herein comprises a protein having an amino acid sequence having at least about 70%, 75%, 80%, 85%, 90%, 95%, 96%, 97%, 98%, 99%, or 100% sequence identity to the Anellovirus ORF1/1 amino acid sequence of Table 14. In embodiments, the curon described herein comprises a protein having an amino acid sequence having at least about 70%, 75%, 80%, 85%, 90%, 95%, 96%, 97%, 98%, 99%, or 100% sequence identity to the Anellovirus ORF1/2 amino acid sequence of Table 14. In embodiments, the curon described herein comprises a protein having an amino acid sequence having at least about 70%, 75%, 80%, 85%, 90%, 95%, 96%, 97%, 98%, 99%, or 100% sequence identity to the Anellovirus ORF2 amino acid sequence of Table 14. In embodiments, the curon described herein comprises a protein having an amino acid sequence having at least about 70%, 75%, 80%, 85%, 90%, 95%, 96%, 97%, 98%, 99%, or 100% sequence identity to the Anellovirus ORF2/2 amino acid sequence of Table 14. In embodiments, the curon described herein comprises a protein having an amino acid sequence having at least about 70%, 75%, 80%, 85%, 90%, 95%, 96%, 97%, 98%, 99%, or 100% sequence identity to the Anellovirus ORF2/3 amino acid sequence of Table 14.

TABLE 1
Exemplary Anellovirus nucleic acid
sequence (Alphatorquevirus, Clade 1)
Name TTV-CT30F
Genus/Clade Alphatorquevirus, Clade 1
Accession Number AB064597.1
Full Sequence: 3570 bp

1 10 20 30 40 50
| | | | | |
ATTTTGTGCAGCCCGCCAATTCTCGTTCAAACAGGCCAATCAGGAGGCTC
TACGTACACTTCCTGGGGTGTGTCTTCGAAGAGTATATAAGCAGAGGCGG
TGACGAATGGTAGAGTTTTTCCTGGCCCGTCCGCGGCGAGAGCGCGAGCG
GAGCGAGCGATCGAGCGTCCCGTGGGCGGGTGCCGTAGGTGAGTTTACAC
ACCGCAGTCAAGGGGCAATTCGGGCTCGGGACTGGCCGGGCTATGGGCAA
GATTCTTAAAAAATTCCCCCGATCCCTCTGTCGCCAGGACATAAAAACAT
GCCGTGGAGACCGCCGGTGCATAGTGTCCAGGGGCGAGAGGATCAGTGGT
TCGCGAGCTTTTTTCACGGCCACGCTTCATTTTGCGGTTGCGGTGACGCT
GTTGGCCATCTTAATAGCATTGCTCCTCGCTTTCCTCGCGCCGGTCCACC
AAGGCCCCCTCCGGGGCTAGAGCAGCCTAACCCCCCGCAGCAGGGCCCGG
CCGGGCCCGGAGGGCCGCCCGCCATCTTGGCGCTGCCGGCTCCGCCCGCG
GAGCCTGACGACCCGCAGCCACGGCGTGGTGGTGGGGACGGTGGCGCCGC
CGCTGGCGCCGCAGGCGACCGTGGAGACCGAGACTACGACGAAGAAGAGC
TAGACGAGCTTTTCCGCGCCGCCGCCGAAGACGATTTGTAAGTAGGAGAT
GGCGCCGGCCTTACAGGCGCAGGAGGAGACGCGGGCGACGCAGACGCAGA
CGCAGACGCAGACATAAGCCCACCCTAGTACTCAGACAGTGGCAACCTGA
CGTTATCAGACACTGTAAGATAACAGGACGGATGCCCCTCATTATCTGTG
GAAAGGGGTCCACCCAGTTCAACTACATCACCCACGCGGACGACATCACC
CCCAGGGGAGCCTCCTACGGGGGCAACTTCACAAACATGACTTTCTCCCT
GGAGGCAATATACGAACAGTTTCTGTACCACAGAAACAGGTGGTCAGCCT
CCAACCACGACCTCGAACTCTGCAGATACAAGGGTACCACCCTAAAACTG
TACAGGCACCCAGATGTAGACTACATAGTCACCTACAGCAGAACGGGACC
CTTTGAGATCAGCCACATGACCTACCTCAGCACTCACCCCCTTCTCATGC
TGCTAAACAAACACCACATAGTGGTGCCCAGCCTAAAGACTAAGCCCAGG
GGCAGAAAGGCCATAAAAGTCAGAATAAGACCCCCCAAACTCATGAACAA
CAAGTGGTACTTCACCAGAGACTTCTGTAACATAGGCCTCTTCCAGCTCT
GGGCCACAGGCTTAGAACTCAGAAACCCCTGGCTCAGAATGAGCACCCTG
AGCCCCTGCATAGGCTTCAATGTCCTTAAAAACAGCATTTACACAAACCT
CAGCAACCTACCTCAGCACAGAGAAGACAGACTTAACATTATTAACAACA
CATTACACCCACATGACATAACAGGACCAAACAATAAAAAATGGCAGTAC
ACATATACCAAACTCATGGCCCCCATTTACTATTCAGCAAACAGGGCCAG
CACCTATGACTTACTACGAGAGTATGGCCTCTACAGTCCATACTACCTAA
ACCCCACAAGGATAAACCTTGACTGGATGACCCCCTACACACACGTCAGG
TACAATCCACTAGTAGACAAGGGCTTCGGAAACAGAATATACATACAGTG
GTGCTCAGAGGCAGATGTAAGCTACAACAGGACTAAATCCAAGTGTCTCT
TACAAGACATGCCCCTGTTTTTCATGTGCTATGGCTACATAGACTGGGCA
ATTAAAAACACAGGGGTCTCCTCACTAGCGAGAGACGCCAGAATCTGCAT
CAGGTGTCCCTACACAGAGCCACAGCTGGTGGGCTCCACAGAAGACATAG
GGTTCGTACCCATCACAGAGACCTTCATGAGGGGCGACATGCCGGTACTT
GCACCATACATACCGTTGAGCTGGTTTTGCAAGTGGTATCCCAACATAGC
TCACCAGAAGGAAGTACTTGAGGCAATCATTTCCTGCAGCCCCTTCATGC
CCCGTGACCAGGGCATGAACGGTTGGGATATTACAATAGGTTACAAAATG
GACTTCTTATGGGGCGGTTCCCCTCTCCCCTCACAGCCAATCGACGACCC
CTGCCAGCAGGGAACCCACCCGATTCCCGACCCCGATAAGCACCCTCGCC
TCCTACAAGTGTCGAACCCGAAACTGCTCGGACCGAGGACAGTGTTCCAC
AAGTGGGACATCAGACGTGGGCAGTTTAGCAAAAGAAGTATTAAAAGAGT
GTCAGAATACTCATCGGATGATGAATCTCTTGCGCCAGGTCTCCCATCAA
AGCGAAACAAGCTCGACTCGGCCTTCAGAGGAGAAAACCCAGAGCAAAAA
GAATGCTATTCTCTCCTCAAAGCACTCGAGGAAGAAGAGACCCCAGAAGA
AGAAGAACCAGCACCCCAAGAAAAAGCCCAGAAAGAGGAGCTACTCCACC
AGCTCCAGCTCCAGAGACGCCACCAGCGAGTCCTCAGACGAGGGCTCAAG
CTCGTCTTTACAGACATCCTCCGACTCCGCCAGGGAGTCCACTGGAACCC
CGAGCTCACATAGAGCCCCCACCTTACATACCAGACCTACTTTTTCCCAA
TACTGGTAAAAAAAAAAAATTCTCTCCCTTCGACTGGGAAACGGAGGCCC
AGCTAGCAGGGATATTCAAGCGTCCTATGCGCTTCTATCCCTCAGACACC
CCTCACTACCCGTGGTTACCCCCCAAGCGCGATATCCCGAAAATATGTAA
CATAAACTTCAAAATAAAGCTGCAAGAGTGAGTGATTCGAGGCCCTCCTC
TGTTCACTTAGCGGTGTCTACCTCTTAAAGTCACCAAGCACTCCGAGCGT
CAGCGAGGAGTGCGACCCTCCACCAAGGGGCAACTTCCTCGGGGTCCGGC
GCTACGCGCTTCGCGCTGCGCCGGACGCCTCGGACCCCCCCCCGACCCGA
ATCGCTCGCGCGATTCGGACCTGCGGCCTCGGGGGGGGTCGGGGGCTTTA
CTAAACAGACTCCGAGTTGCCACTGGACTCAGGAGCTGTGAATCAGTAAC
GAAAGTGAGTGGGGCCAGACTTCGCCATAGGGCCTTTAACTTGGGGTCGT
CTGTCGGTGGCTTCCGGGTCCGCCTGGGCGCCGCCATTTTAGCTTTAGAC
GCCATTTTAGGCCCTCGCGGGCACCCGTAGGCGCGTTTTAATGACGTCAC
GGCAGCCATTTTGTCGTGACGTTTGAGACACGTGATGGGGGCGTGCCTAA
ACCCGGAAGCATCCCTGGTCACGTGACTCTGACGTCACGGCGGCCATTTT
GTGCTGTCCGCCATCTTGTGACTTCCTTCCGCTTTTTCAAAAAAAAAGAG
GAAGTATGACAGTAGCGGCGGGGGGGCGGCCGCGTTCGCGCGCCGCCCAC
CAGGGGGTGCTGCGCGCCCCCCCCCGCGCATGCGCGGGGCCCCCCCCCGG
GGGGGCTCCGCCCCCCCGGCCCCCCCCCGTGCTAAACCCACCGCGCATGC
GCGACCACGCCCCCGCCGCC (SEQ ID NO: 1)

[0393] Annotations:

| Putative Domain | Base range |
|---|---|
| TATA Box | 84-90 |
| Cap Site | 107-114 |
| Transcriptional Start Site | 114 |
| 5′ UTR Conserved Domain | 177-247 |
| ORF2 | 299-691 |
| ORF2/2 | 299-687; 2137-2659 |
| ORF2/3 | 299-687; 2339-2831 |
| ORF2t/3 | 299-348; 2339-2831 |
| ORF1 | 571-2613 |
| ORF1/1 | 571-687; 2137-2613 |
| ORF1/2 | 571-687; 2339-2659 |
| Three open-reading frame region | 2325-2610 |
| Poly(A) Signal | 2813-2818 |
| GC-rich region | 3415-3570 |

TABLE 2
Exemplary Anellovirus amino acid sequences (Alphatorquevirus,
Clade 1)
TTV-CT30F (Alphatorquevirus Clade 1)

| | |
|---|---|
| ORF2 | MPWRPPVHSVQGREDQWFASFFHGHASFCGCGDAVGHLNSIAPRFPRAGPPRPPPG |
| | LEQPNPPQQGPAGPGGPPAILALPAPPAEPDDPQPRRGGGDGGAAAGAAGDRGDRD |
| | YDEEELDELFRAAAEDDL (SEQ ID NO: 2) |
| ORF2/2 | MPWRPPVHSVQGREDQWFASFFHGHASFCGCGDAVGHLNSIAPRFPRAGPPRPPPG |
| | LEQPNPPQQGPAGPGGPPAILALPAPPAEPDDPQPRRGGGDGGAAAGAAGDRGDRD |
| | YDEEELDELFRAAAEDDFQSTTPASREPTRFPTPISTLASYKCRTRNCSDRGQCSTSG |
| | TSDVGSLAKEVLKECQNTHRMMNLLRQVSHQSETSSTRPSEEKTQSKKNAILSSKH |
| | SRKKRPQKKKNQHPKKKPRKRSYSTSSSSRDATSESSDEGSSSSLQTSSDSARESTGT |
| | PSSHRAPTLHTRPTFSQYW (SEQ ID NO: 3) |
| ORF2/3 | MPWRPPVHSVQGREDQWFASFFHGHASFCGCGDAVGHLNSIAPRFPRAGPPRPPPG |
| | LEQPNPPQQGPAGPGGPPAILALPAPPAEPDDPQPRRGGGDGGAAAGAAGDRGDRD |
| | YDEEELDELFRAAAEDDLSPIKAKQARLGLQRRKPRAKRMLFSPQSTRGRRDPRRR |
| | RTSTPRKSPERGATPPAPAPETPPASPQTRAQARLYRHPPTPPGSPLEPRAHIEPPPYIP |
| | DLLFPNTGKKKKFSPFDWETEAQLAGIFKRPMRFYPSDTPHYPWLPPKRDIPKICNIN |
| | FKIKLQE (SEQ ID NO: 4) |
| ORF2t/3 | MPWRPPVHSVQGREDQWSPIKAKQARLGLQRRKPRAKRMLFSPQSTRGRRDPRRR |
| | RTSTPRKSPERGATPPAPAPETPPASPQTRAQARLYRHPPTPPGSPLEPRAHIEPPPYIP |
| | DLLFPNTGKKKKFSPFDWETEAQLAGIFKRPMRFYPSDTPHYPWLPPKRDIPKICNIN |
| | FKIKLQE (SEQ ID NO: 5) |
| ORF1 | TAWWWGRWRRRWRRRRPWRPRLRRRRARRAFPRRRRRRFVSRRWRRPYRRRRR |
| | RGRRRRRRRRRHKPTLVLRQWQPDVIRHCKITGRMPLIICGKGSTQFNYITHADDIT |
| | PRGASYGGNFTNMTFSLEAIYEQFLYHRNRWSASNHDLELCRYKGTTLKLYRHPD |
| | VDYIVTYSRTGPFEISHMTYLSTHPLLMLLNKHHIVVPSLKTKPRGRKAIKVRIRPPK |
| | LMNNKWYFTRDFCNIGLFQLWATGLELRNPWLRMSTLSPCIGFNVLKNSIYTNLSN |
| | LPQHREDRLNIINNTLHPHDITGPNNKKWQYTYTKLMAPIYYSANRASTYDLLREY |
| | GLYSPYYLNPTRINLDWMTPYTHVRYNPLVDKGFGNRIYIQWCSEADVSYNRTKSK |
| | CLLQDMPLFFMCYGYIDWAIKNTGVSSLARDARICIRCPYTEPQLVGSTEDIGFVPIT |
| | ETFMRGDMPVLAPYIPLSWFCKWYPNIAHQKEVLEAIISCSPFMPRDQGMNGWDITI |
| | GYKMDFLWGGSPLPSQPIDDPCQQGTHPIPDPDKHPRLLQVSNPKLLGPRTVFHKW |
| | DIRRGQFSKRSIKRVSEYSSDDESLAPGLPSKRNKLDSAFRGENPEQKECYSLLKALE |
| | EEETPEEEEPAPQEKAQKEELLHQLQLQRRHQRVLRRGLKLVFTDILRLRQGVHWN |
| | PELT (SEQ ID NO: 6) |
| ORF1/1 | TAWWWGRWRRRWRRRRPWRPRLRRRRARRAFPRRRRRRFPIDDPCQQGTHPIPDP |
| | DKHPRLLQVSNPKLLGPRTVFHKWDIRRGQFSKRSIKRVSEYSSDDESLAPGLPSKR |
| | NKLDSAFRGENPEQKECYSLLKALEEEETPEEEEPAPQEKAQKEELLHQLQLQRRH |
| | QRVLRRGLKLVFTDILRLRQGVHWNPELT (SEQ ID NO: 7) |
| ORF1/2 | TAWWWGRWRRRWRRRRPWRPRLRRRRARRAFPRRRRRRFVSHQSETSSTRPSEE |
| | KTQSKKNAILSSKHSRKKRPQKKKNQHPKKKPRKRSYSTSSSSRDATSESSDEGSSS |
| | SLQTSSDSARESTGTPSSHRAPTLHTRPTFSQYW (SEQ ID NO: 8) |

TABLE 3
Exemplary Anellovirus nucleic acid sequence
(Alphatorquevirus, Clade 2)
Name TTV-TJN02
Genus/Clade Alphatorquevirus, Clade 2
Accession Number AB028669.1
Full Sequence: 3794 bp

1 10 20 30 40 50
| | | | | |
CCCGAAGTCCGTCACTAACCACGTGACTCCTGTCGCCCAATCAGAGTGTA
TGTCGTGCATTTCCTGGGCATGGTCTACATCCTGATATAACTAAGTGCAC
TTCCGAATGGCTGAGTTTTCCACGCCCGTCCGCAGCGAGGGAGCGACGGA
GGAGCTCCCGAGCGTCCCGAGGGCGGGTGCCGGAGGTGAGTTTACACACC
GCAGTCAAGGGGCAATTCGGGCTCGGGACTGGCCGGGCTATGGGCAAGGC
TCTTAGGGTCTTCATTCTTAATATGTTTCTTGGCAGAGTTTACCGCCACA
AGAAAAGGAAAGTGCTACTGTCCACACTGCGAGCTCCACAGGCGTCTCGC
AGGGCTATGAGTTGGCGACCCCCGGTACACGATGCACCCGGCATCGAGCG
CAATTGGTACGAGGCCTGTTTCAGAGCCCACGCTGGAGCTTGTGGCTGTG
GCAATTTTATTATGCACCTTAATCTTTTGGCTGGGCGTTATGGTTTTACT
CCGGGGTCAGCGCCGCCAGGTGGTCCTCCTCCGGGCACCCCGCAGATAAG
GAGAGCCAGGCCTAGTCCCGCCGCACCAGAGCAGCCCGCTGCCCTACCAT
GGCATGGGGATGGTGGAGATGGCGGCGCCGCTGGCCCGCCAGACGCTGGA
GGAGACGCCGTCGCCGGCGCCCCGTACGGAGAACAAGAGCTCGCCGACCT
GCTCGACGCTATAGAAGACGACGAACAGTAAGAACCAGGCGAAGGCGGTG
GGGGCGCAGACGGTACAGACGGGGCTGGAGACGCAGGACTTATGTGAGAA
AGGGGCGACACAGAAAAAAGAAAAAGAGACTGATACTGAGACAGTGGCAA
CCAGCCACAAGACGCAGATGTACCATAACTGGGTACCTGCCCATAGTGTT
CTGCGGCCACACTAGGGGCAATAAAAACTATGCACTACACTCTGACGACT
ACACCCCCCAAGGACAACCATTTGGAGGGGCTCTAAGCACTACCTCATTC
TCTTTAAAAGTACTATTTGACCAGCATCAGAGAGGACTAAACAAGTGGTC
TTTTCCAAACGACCAACTAGACCTCGCCAGATATAGAGGCTGCAAATTTA
TATTTTATAGAACAAAACAAACTGACTGGGTGGGCCAGTATGACATATCA
GAACCCTACAAGCTAGACAAATACAGCTGCCCCAACTATCACCCTGGAAA
CATGATTAAGGCAAAGCACAAATTTTTAATACCAAGCTATGACACTAATC
CTAGAGGCAGACAAAAAATTATAGTTAAAATTCCCCCCCCAGACCTCTTT
GTAGACAAGTGGTACACTCAAGAGGATCTGTGTTCCGTTAATCTTGTGTC
ACTTGCGGTTTCTGCGGCTTCCTTTCTCCACCCATTCGGCTCACCACAAA
CTGACAACCCTTGCTACACCTTCCAGGTGTTGAAAGAGTTCTACTATCAG
GCAATAGGCTTCTCTGCAAGCACACAAGCAATGACATCAGTATTAGACAC
GCTATACACACAAAACAGTTATTGGGAATCTAATCTAACTCAGTTTTATG
TACTTAATGCAAAAAAAGGCAGTGATACAACACAGCCTTTAACTAGCAAT
ATGCCAACTCGTGAAGAGTTTATGGCAAAAAAAAATACCAATTACAACTG
GTATACATACAAGGCCGCGTCAGTAAAAAATAAACTACATCAAATGAGAC
AAACCTATTTTGAGGAGTTAACCTCTAAGGGGCCACAAACAACAAAAAGT
GAGGAAGGCTACAGTCAGCACTGGACCACCCCCTCCACAAACGCCTACGA
ATATCACTTAGGAATGTTTAGTGCAATATTTCTAGCCCCAGACAGGCCAG
TACCTAGATTTCCATGCGCCTACCAAGATGTAACTTACAACCCCTTAATG
GACAAAGGGGTGGGAAACCACATTTGGTTTCAGTACAACACAAAGGCAGA
CACTCAGCTAATAGTCACAGGAGGGTCCTGCAAAGCACACATACAAGACA
TACCACTGTGGGCGGCCTTCTATGGATACAGTGACTTTATAGAGTCAGAA
CTAGGCCCCTTTGTAGATGCAGAGACGGTAGGCTTAGTGTGTGTAATATG
CCCTTATACAAAACCCCCCATGTACAACAAGACAAACCCCGCCATGGGCT
ACGTGTTCTATGACAGAAACTTTGGTGACGGAAAATGGACTGACGGACGG
GGCAAAATAGAGCCCTACTGGCAAGTTAGGTGGAGGCCCGAAATGCTTTT
CCAAGAAACTGTAATGGCAGACCTAGTTCAGACTGGGCCCTTTAGCTACA
AAGACGAACTTAAAAACAGCACCCTAGTGTGCAAGTACAAATTCTATTTC
ACCTGGGGAGGTAACATGATGTTCCAACAGACGATCAAAAACCCGTGCAA
GACGGACGGACAACCCACCGACTCCAGTAGACACCCTAGAGGAATACAAG
TGGCGGACCCGGAACAAATGGGACCCCGCTGGGTGTTCCACTCCTTTGAC
TGGCGAAGGGGCTATCTTAGCGAGAAAGCTCTCAAACGCCTGCAAGAAAA
ACCTCTTGACTATGACGAATATTTTACACAACCAAAAAGACCTAGAATCT
TTCCTCCAACAGAATCAGCAGAGGGAGAGTTCCGAGAGCCCGAAAAAGGC
TCGTATTCAGAGGAAGAAAGGTCGCAAGCCTCTGCCGAAGAGCAGACGCA
GGAGGCGACAGTACTCCTCCTCAAGCGACGACTCAGAGAGCAACAGCAGC
TCCAGCAGCAGCTCCAATTCCTCACCCGAGAAATGTTCAAAACGCAAGCG
GGTCTCCACCTAAACCCTATGTTATTAAACCAGCGATAAACCAAGTGTAC
CTGTTTCCAGAGAGGGCCCCAAAACCCCCTCCTAGCAGCCAAGACTGGCA
GCAGGAGTACGAGGCCTGCGCAGCCTGGGACAGGCCCCCTAGATACAATC
TGTCCTCTCCTCCTTTCTACCCCAGCTGCCCTTCAAAATTCTGTGTAAAA
TTCAGCCTTGGCTTTAAATAAATGGCAACTTTACTGTGCAAGGCCGTGGG
AGTTTCACTGGTCGGTGTCTACCTCTAAAGGTCACTAAGCACTCCGAGCG
TTAGCGAGGAGTGCGACCCTTCCCCCTGACTCAACTTCTTCGGAGCCGCG
CGCTACGCCTTCGGCTGCGCGCGGCACCTCAGACCCCCGCTCGTGCTGAC
ACGCTCGCGCGTGTCAGACCACTTCGGGCTCGCGGGGGTCGGGAATTTTG
CTAAACAGACTCCGAGTTGCTCTTGGACACTGAGGGGGCATATCAGTAAC
GAAAGTGAGTGGGGCCAGACTTCGCCATAAGGCCTTTATCTTCTTGCCAT
TGGATAGTATCGAGGGTTGCCATAGGCTTCGACCTCCATTTTAGGCCTTC
CGGACTACAAAAATGGCCGTTTTAGTGACGTCACGGCCGCCATTTTAAGT
AAGGCGGAAGCAGCTCGGCGTACACAAAATGGCGGCGGAGCACTTCCGGC
TTGCCCAAAATGGTGGGCAACTTCTTCCGGGTCAAAGGTCACAGCTACGT
CACAAGTCACGTGGGGAGGGTTGGCGTTTAACCCGGAAGCCAATCCTCTT
ACGTGGCCTGTCACGTGACTTGTACGTCACGACCACCATTTTGTTTTACA
AAATGGCCGACTTCCTTCCTCTTTTTTAAAAATAACGGTTCGGCGGCGGC
GCGCGCGCTACGCGCGCGCGCCGGGGGGCTGCCGCCCCCCCCCCGCGCAT
GCGCGGGGCCCCCCCCCGCGGGGGGCTCCGCCCCCCGGCC
CCCC (SEQ ID NO: 9)

[0394] Annotations:

| Putative Domain | Base range |
|---|---|
| TATA Box | 89-90 |
| Cap Site | 107-114 |
| Transcriptional Start Site | 114 |
| 5′ UTR Conserved Domain | 174-244 |
| ORF2 | 357-731 |
| ORF2/2 | 357-727; 2381 -2813 |
| ORF2/3 | 357-727; 2619-3021 |
| ORF2t/3 | 357-406; 2619-3021 |
| ORF1 | 599-2839 |
| ORF1/1 | 599-727; 2381-2839 |
| ORF1/2 | 599-727; 2619-2813 |
| Three open-reading frame region | 2596-2810 |
| Poly(A) Signal | 3017-3022 |
| GC-rich region | 3691-3794 |

TABLE 4
Exemplary Anellovirus amino acid sequences (Alphatorquevirus, Clade 2)
TTV-TJN02 (Alphatorquevirus Clade 2)

| | |
|---|---|
| ORF2 | MSWRPPVHDAPGIERNWYEACFRAHAGACGCGNFIMHLNLLAGRYGFTPGSAPPG |
| | GPPPGTPQIRRARPSPAAPEQPAALPWHGDGGDGGAAGPPDAGGDAVAGAPYGEQ |
| | ELADLLDAIEDDEQ (SEQ ID NO: 10) |
| ORF2/2 | MSWRPPVHDAPGIERNWYEACFRAHAGACGCGNFIMHLNLLAGRYGFTPGSAPPG |
| | GPPPGTPQIRRARPSPAAPEQPAALPWHGDGGDGGAAGPPDAGGDAVAGAPYGEQ |
| | ELADLLDAIEDDEQRSKTRARRTDNPPTPVDTLEEYKWRTRNKWDPAGCSTPLTGE |
| | GAILARKLSNACKKNLLTMTNILHNQKDLESFLQQNQQRESSESPKKARIQRKKGR |
| | KPLPKSRRRRRQYSSSSDDSESNSSSSSSSNSSPEKCSKRKRVST (SEQ ID NO: 11) |
| ORF2/3 | MSWRPPVHDAPGIERNWYEACFRAHAGACGCGNFIMHLNLLAGRYGFTPGSAPPG |
| | GPPPGTPQIRRARPSPAAPEQPAALPWHGDGGDGGAAGPPDAGGDAVAGAPYGEQ |
| | ELADLLDAIEDDEHRGRVPRARKRLVFRGRKVASLCRRADAGGDSTPPQATTQRAT |
| | AAPAAAPIPHPRNVQNASGSPPKPYVIKPAINQVYLFPERAPKPPPSSQDWQQEYEA |
| | CAAWDRPPRYNLSSPPFYPSCPSKFCVKFSLGFK (SEQ ID NO: 12) |
| ORF2t/3 | MSWRPPVHDAPGIERNCRGRVPRARKRLVFRGRKVASLCRRADAGGDSTPPQATT |
| | QRATAAPAAAPIPHPRNVQNASGSPPKPYVIKPAINQVYLFPERAPKPPPSSQDWQQ |
| | EYEACAAWDRPPRYNLSSPPFYPSCPSKFCVKFSLGFK (SEQ ID NO: 13) |
| ORF1 | MAWGWWRWRRRWPARRWRRRRRRRPVRRTRARRPARRYRRRRTVRTRRRRWG |
| | RRRYRRGWRRRTYVRKGRHRKKKKRLILRQWQPATRRRCTITGYLPIVFCGHTRG |
| | NKNYALHSDDYTPQGQPFGGALSTTSFSLKVLFDQHQRGLNKWSFPNDQLDLARY |
| | RGCKFIFYRTKQTDWVGQYDISEPYKLDKYSCPNYHPGNMIKAKHKFLIPSYDTNP |
| | RGRQKIIVKIPPPDLFVDKWYTQEDLCSVNLVSLAVSAASFLHPFGSPQTDNPCYTF |
| | QVLKEFYYQAIGFSASTQAMTSVLDTLYTQNSYWESNLTQFYVLNAKKGSDTTQPL |
| | TSNMPTREEFMAKKNTNYNWYTYKAASVKNKLHQMRQTYFEELTSKGPQTTKSE |
| | EGYSQHWTTPSTNAYEYHLGMFSAIFLAPDRPVPRFPCAYQDVTYNPLMDKGVGN |
| | HIWFQYNTKADTQLIVTGGSCKAHIQDIPLWAAFYGYSDFIESELGPFVDAETVGLV |
| | CVICPYTKPPMYNKTNPAMGYVFYDRNFGDGKWTDGRGKIEPYWQVRWRPEMLF |
| | QETVMADLVQTGPFSYKDELKNSTLVCKYKFYFTWGGNMMFQQTIKNPCKTDGQ |
| | PTDSSRHPRGIQVADPEQMGPRWVFHSFDWRRGYLSEKALKRLQEKPLDYDEYFT |
| | QPKRPRIFPPTESAEGEFREPEKGSYSEEERSQASAEEQTQEATVLLLKRRLREQQQL |
| | QQQLQFLTREMFKTQAGLHLNPMLLNQR (SEQ ID NO: 14) |
| ORF1/1 | MAWGWWRWRRRWPARRWRRRRRRRPVRRTRARRPARRYRRRRTTIKNPCKTDG |
| | QPTDSSRHPRGIQVADPEQMGPRWVFHSFDWRRGYLSEKALKRLQEKPLDYDEYF |
| | TQPKRPRIFPPTESAEGEFREPEKGSYSEEERSQASAEEQTQEATVLLLKRRLREQQQ |
| | LQQQLQFLTREMFKTQAGLHLNPMLLNQR (SEQ ID NO: 15) |
| ORF1/2 | MAWGWWRWRRRWPARRWRRRRRRRPVRRTRARRPARRYRRRRTQRESSESPKK |
| | ARIQRKKGRKPLPKSRRRRRQYSSSSDDSESNSSSSSSSNSSPEKCSKRKRVST (SEQ |
| | ID NO: 16) |

TABLE 5
Exemplary Anellovirus nucleic acid sequence
(Alphatorquevirus, Clade 3)
Name TTV-tth8
Genus/Clade Alphatorquevirus, Clade 3
Accession Number AJ620231.1
Full Sequence: 3753 bp

1 10 20 30 40 50
| | | | | |
TGCTACGTCACTAACCCACGTGTCCTCTACAGGCCAATCGCAGTCTATGT
CGTGCACTTCCTGGGCATGGTCTACATAATTATATAAATGCTTGCACTTC
CGAATGGCTGAGTTTTTGCTGCCCGTCCGCGGAGAGGAGCCACGGCAGGG
GATCCGAACGTCCTGAGGGCGGGTGCCGGAGGTGAGTTTACACACCGAAG
TCAAGGGGCAATTCGGGCTCAGGACTGGCCGGGCTTTGGGCAAGGCTCTT
AAAAATGCACTTTTCTCGAATAAGCAGAAAGAAAAGGAAAGTGCTACTGC
TTTGCGTGCCAGCAGCTAAGAAAAAACCAACTGCTATGAGCTTCTGGAAA
CCTCCGGTACACAATGTCACGGGGATCCAACGCATGTGGTATGAGTCCTT
TCACCGTGGCCACGCTTCTTTTTGTGGTTGTGGGAATCCTATACTTCACA
TTACTGCACTTGCTGAAACATATGGCCATCCAACAGGCCCGAGACCTTCT
GGGCCACCGGGAGTAGACCCCAACCCCCACATCCGTAGAGCCAGGCCTGC
CCCGGCCGCTCCGGAGCCCTCACAGGTTGATTCGAGACCAGCCCTGACAT
GGCATGGGGATGGTGGAAGCGACGGAGGCGCTGGTGGTTCCGGAAGCGGT
GGACCCGTGGCAGACTTCGCAGACGATGGCCTCGATCAGCTCGTCGCCGC
CCTAGACGACGAAGAGTAAGGAGGCGCAGACGGTGGAGGAGGGGGAGACG
AAAAACAAGGACTTACAGACGCAGGAGACGCTTTAGACGCAGGGGACGAA
AAGCAAAACTTATAATAAAACTGTGGCAACCTGCAGTAATTAAAAGATGC
AGAATAAAGGGATACATACCACTGATTATAAGTGGGAACGGTACCTTTGC
CACAAACTTTACCAGTCACATAAATGACAGAATAATGAAAGGCCCCTTCG
GGGGAGGACACAGCACTATGAGGTTCAGCCTCTACATTTTGTTTGAGGAG
CACCTCAGACACATGAACTTCTGGACCAGAAGCAACGATAACCTAGAGCT
AACCAGATACTTGGGGGCTTCAGTAAAAATATACAGGCACCCAGACCAAG
ACTTTATAGTAATATACAACAGAAGAACCCCTCTAGGAGGCAACATCTAC
ACAGCACCCTCTCTACACCCAGGCAATGCCATTTTAGCAAAACACAAAAT
ATTAGTACCAAGTTTACAGACAAGACCAAAGGGTAGAAAAGCAATTAGAC
TAAGAATAGCACCCCCCACACTCTTTACAGACAAGTGGTACTTTCAAAAG
GACATAGCCGACCTCACCCTTTTCAACATCATGGCAGTTGAGGCTGACTT
GCGGTTTCCGTTCTGCTCACCACAAACTGACAACACTTGCATCAGCTTCC
AGGTCCTTAGTTCCGTTTACAACAACTACCTCAGTATTAATACCTTTAAT
AATGACAACTCAGACTCAAAGTTAAAAGAATTTTTAAATAAAGCATTTCC
AACAACAGGCACAAAAGGAACAAGTTTAAATGCACTAAATACATTTAGAA
CAGAAGGATGCATAAGTCACCCACAACTAAAAAAACCAAACCCACAAATA
AACAAACCATTAGAGTCACAATACTTTGCACCTTTAGATGCCCTCTGGGG
AGACCCCATATACTATAATGATCTAAATGAAAACAAAAGTTTGAACGATA
TCATTGAGAAAATACTAATAAAAAACATGATTACATACCATGCAAAACTA
AGAGAATTTCCAAATTCATACCAAGGAAACAAGGCCTTTTGCCACCTAAC
AGGCATATACAGCCCACCATACCTAAACCAAGGCAGAATATCTCCAGAAA
TATTTGGACTGTACACAGAAATAATTTACAACCCTTACACAGACAAAGGA
ACTGGAAACAAAGTATGGATGGACCCACTAACTAAAGAGAACAACATATA
TAAAGAAGGACAGAGCAAATGCCTACTGACTGACATGCCCCTATGGACTT
TACTTTTTGGATATACAGACTGGTGTAAAAAGGACACTAATAACTGGGAC
TTACCACTAAACTACAGACTAGTACTAATATGCCCTTATACCTTTCCAAA
ATTGTACAATGAAAAAGTAAAAGACTATGGGTACATCCCGTACTCCTACA
AATTCGGAGCGGGTCAGATGCCAGACGGCAGCAACTACATACCCTTTCAG
TTTAGAGCAAAGTGGTACCCCACAGTACTACACCAGCAACAGGTAATGGA
GGACATAAGCAGGAGCGGGCCCTTTGCACCTAAGGTAGAAAAACCAAGCA
CTCAGCTGGTAATGAAGTACTGTTTTAACTTTAACTGGGGCGGTAACCCT
ATCATTGAACAGATTGTTAAAGACCCCAGCTTCCAGCCCACCTATGAAAT
ACCCGGTACCGGTAACATCCCTAGAAGAATACAAGTCATCGACCCGCGGG
TCCTGGGACCGCACTACTCGTTCCGGTCATGGGACATGCGCAGACACACA
TTTAGCAGAGCAAGTATTAAGAGAGTGTCAGAACAACAAGAAACTTCTGA
CCTTGTATTCTCAGGCCCAAAAAAGCCTCGGGTCGACATCCCAAAACAAG
AAACCCAAGAAGAAAGCTCACATTCACTCCAAAGAGAATCGAGACCGTGG
GAGACCGAGGAAGAAAGCGAGACAGAAGCCCTCTCGCAAGAGAGCCAAGA
GGTCCCCTTCCAACAGCAGTTGCAGCAGCAGTACCAAGAGCAGCTCAAGC
TCAGACAGGGAATCAAAGTCCTCTTCGAGCAGCTCATAAGGACCCAACAA
GGGGTCCATGTAAACCCATGCCTACGGTAGGTCCCAGGCAGTGGCTGTTT
CCAGAGAGAAAGCCAGCCCCAGCTCCTAGCAGTGGAGACTGGGCCATGGA
GTTTCTCGCAGCAAAAATATTTGATAGGCCAGTTAGAAGCAACCTTAAAG
ATACCCCTTACTACCCATATGTTAAAAACCAATACAATGTCTACTTTGAC
CTTAAATTTGAATAAACAGCAGCTTCAAACTTGCAAGGCCGTGGGAGTTT
CACTGGTCGGTGTCTACCTCTAAAGGTCACTAAGCACTCCGAGCGTAAGC
GAGGAGTGCGACCCTCCCCCCTGGAACAACTTCTTCGGAGTCCGGCGCTA
CGCCTTCGGCTGCGCCGGACACCTCAGACCCCCCCTCCACCCGAAACGCT
TGCGCGTTTCGGACCTTCGGCGTCGGGGGGGTCGGGAGCTTTATTAAACG
GACTCCGAAGTGCTCTTGGACACTGAGGGGGTGAACAGCAACGAAAGTGA
GTGGGGCCAGACTTCGCCATAAGGCCTTTATCTTCTTGCCATTTGTCAGT
GTCCGGGGTCGCCATAGGCTTCGGGCTCGTTTTTAGGCCTTCCGGACTAC
AAAAATCGCCATTTTGGTGACGTCACGGCCGCCATCTTAAGTAGTTGAGG
CGGACGGTGGCGTGAGTTCAAAGGTCACCATCAGCCACACCTACTCAAAA
TGGTGGACAATTTCTTCCGGGTCAAAGGTTACAGCCGCCATGTTAAAACA
CGTGACGTATGACGTCACGGCCGCCATTTTGTGACACAAGATGGCCGACT
TCCTTCCTCTTTTTCAAAAAAAAGCGGAAGTGCCGCCGCGGCGGCGGGGG
GCGGCGCGCTGCGCGCGCCGCCCAGTAGGGGGAGCCATGCGCCCCCCCCC
GCGCATGCGCGGGGCCCCCCCCCGCGGGGGGCTCCGCCCCCCGGCCCCCC
CCG (SEQ ID NO: 17)

[0395] Annotations:

| Putative Domain | Base range |
|---|---|
| TATA Box | 83-88 |
| Cap Site | 104-111 |
| Transcriptional Start Site | 111 |
| 5′ UTR Conserved Domain | 170-240 |
| ORF2 | 336-719 |
| ORF2/2 | 336-715; 2363-2789 |
| ORF2/3 | 336-715; 2565-3015 |
| ORF2t/3 | 336-388; 2565-3015 |
| ORF1 | 599-2830 |
| ORF1/1 | 599-715; 2363-2830 |
| ORF1/2 | 599-715; 2565-2789 |
| Three open-reading frame region | 2551-2786 |
| Poly(A) Signal | 3011-3016 |
| GC-rich region | 3632-3753 |

TABLE 6
Exemplary Anellovirus amino acid sequences
(Alphatorquevirus, Clade 3)
TTV-tth8 (Alphatorquevirus Clade 3)

| | |
|---|---|
| ORF2 | MSFWKPPVHNVTGIQRMWYESFHRGHASFCGCGNPILHITALAETYGHPTGPRPSG |
| | PPGVDPNPHIRRARPAPAAPEPSQVDSRPALTWHGDGGSDGGAGGSGSGGPVADFA |
| | DDGLDQLVAALDDEE (SEQ ID NO: 18) |
| ORF2/2 | MSFWKPPVHNVTGIQRMWYESFHRGHASFCGCGNPILHITALAETYGHPTGPRPSG |
| | PPGVDPNPHIRRARPAPAAPEPSQVDSRPALTWHGDGGSDGGAGGSGSGGPVADFA |
| | DDGLDQLVAALDDEELLKTPASSPPMKYPVPVTSLEEYKSSTRGSWDRTTRSGHGT |
| | CADTHLAEQVLRECQNNKKLLTLYSQAQKSLGSTSQNKKPKKKAHIHSKENRDRG |
| | RPRKKARQKPSRKRAKRSPSNSSCSSSTKSSSSSDRESKSSSSSS (SEQ ID NO: 19) |
| ORF2/3 | MSFWKPPVHNVTGIQRMWYESFHRGHASFCGCGNPILHITALAETYGHPTGPRPSG |
| | PPGVDPNPHIRRARPAPAAPEPSQVDSRPALTWHGDGGSDGGAGGSGSGGPVADFA |
| | DDGLDQLVAALDDEEPKKASGRHPKTRNPRRKLTFTPKRIETVGDRGRKRDRSPLA |
| | REPRGPLPTAVAAAVPRAAQAQTGNQSPLRAAHKDPTRGPCKPMPTVGPRQWLFP |
| | ERKPAPAPSSGDWAMEFLAAKIFDRPVRSNLKDTPYYPYVKNQYNVYFDLKFE |
| | (SEQ ID NO: 20) |
| ORF2t/3 | MSFWKPPVHNVTGIQRMWPKKASGRHPKTRNPRRKLTFTPKRIETVGDRGRKRDR |
| | SPLAREPRGPLPTAVAAAVPRAAQAQTGNQSPLRAAHKDPTRGPCKPMPTVGPRQ |
| | WLFPERKPAPAPSSGDWAMEFLAAKIFDRPVRSNLKDTPYYPYVKNQYNVYFDLK |
| | FE (SEQ ID NO: 21) |
| ORF1 | MAWGWWKRRRRWWFRKRWTRGRLRRRWPRSARRRPRRRRVRRRRRWRRGRRK |
| | TRTYRRRRRFRRRGRKAKLIIKLWQPAVIKRCRIKGYIPLIISGNGTFATNFTSHINDR |
| | IMKGPFGGGHSTMRFSLYILFEEHLRHMNFWTRSNDNLELTRYLGASVKIYRHPDQ |
| | DFIVIYNRRTPLGGNIYTAPSLHPGNAILAKHKILVPSLQTRPKGRKAIRLRIAPPTLFT |
| | DKWYFQKDIADLTLFNIMAVEADLRFPFCSPQTDNTCISFQVLSSVYNNYLSINTFN |
| | NDNSDSKLKEFLNKAFPTTGTKGTSLNALNTFRTEGCISHPQLKKPNPQINKPLESQ |
| | YFAPLDALWGDPIYYNDLNENKSLNDIIEKILIKNMITYHAKLREFPNSYQGNKAFC |
| | HLTGIYSPPYLNQGRISPEIFGLYTEIIYNPYTDKGTGNKVWMDPLTKENNIYKEGQS |
| | KCLLTDMPLWTLLFGYTDWCKKDTNNWDLPLNYRLVLICPYTFPKLYNEKVKDY |
| | GYIPYSYKFGAGQMPDGSNYIPFQFRAKWYPTVLHQQQVMEDISRSGPFAPKVEKP |
| | STQLVMKYCFNFNWGGNPIIEQIVKDPSFQPTYEIPGTGNIPRRIQVIDPRVLGPHYSF |
| | RSWDMRRHTFSRASIKRVSEQQETSDLVFSGPKKPRVDIPKQETQEESSHSLQRESR |
| | PWETEEESETEALSQESQEVPFQQQLQQQYQEQLKLRQGIKVLFEQLIRTQQGVHV |
| | NPCLR (SEQ ID NO: 22) |
| ORF1/1 | MAWGWWKRRRRWWFRKRWTRGRLRRRWPRSARRRPRRRRIVKDPSFQPTYEIPG |
| | TGNIPRRIQVIDPRVLGPHYSFRSWDMRRHTFSRASIKRVSEQQETSDLVFSGPKKPR |
| | VDIPKQETQEESSHSLQRESRPWETEEESETEALSQESQEVPFQQQLQQQYQEQLKL |
| | RQGIKVLFEQLIRTQQGVHVNPCLR (SEQ ID NO: 23) |
| ORF1/2 | MAWGWWKRRRRWWFRKRWTRGRLRRRWPRSARRRPRRRRAQKSLGSTSQNKK |
| | PKKKAHIHSKENRDRGRPRKKARQKPSRKRAKRSPSNSSCSSSTKSSSSSDRESKSSS |
| | SSS (SEQ ID NO: 24) |

TABLE 7
Exemplary Anellovirus nucleic acid sequence
(Alphatorquevirus, Clade 4)
Name TTV-JA20
Genus/Clade Alphatorquevirus, Clade 4
Accession Number AF122914.3
Full Sequence: 3853 bp

1 10 20 30 40 50
| | | | | |
GGCTTAGTGCGTCACCACCCACGTGACCCGCCTCCGCCAATTAACAGGTA
CTTCGTACACTTCCTGGGCGGGCTTATAAGACTAATATAAGTAGCTGCAC
TTCCGAATGGCTGAGTTTTCCACGCCCGTCCGCAGCGGTGAAGCCACGGA
GGGAGCTCAGCGCGTCCCGAGGGCGGGTGCCGGAGGTGAGTTTACACACC
GCAGTCAAGGGGCAATTCGGGCTCGGGACTGGCCGGGCTTTGGGCAAGGC
TCTTAAAAAAGCTATGTTTATTGGCAGGCACTACCGAAAGAAAAGGGCGC
TGCTACTGCTATCTGTGCATTCTACAAAGACAAAAGGGAAACTTCTAATA
GCTATGTGGACTCCCCCACGCAATGATCAACAATACCTTAACTGGCAATG
GTACACTTCTGTACTTAGCTCCCACTCTGCTATGTGCGGGTGTTCCGACG
CTATCGCTCATCTTAATCATCTTGCTAATCTGCTTCGTGCCCCGCAAAAT
CCGCCCCCGCCTGATAATCCAAGACCCCTACCCGTGCGAGCACTGCCTGC
TCCCCCGGCTGCCCACGAGGCAGCCGGTGATCGAGCACCATGGCCTATGG
GTGGTGGAGGAGACGCCGGAGGCGCTGGCGCAGGTGGAGACGCCGACCAT
GGAGGCGCCGCTGGAGGACCCGCAGACGCAGACCTGCTAGACGCCGTGGC
CGCCGCAGAAACGTAAGGAGACGGCGCAGAGGGAGGTGGAGAAGGAGGTA
CAGGAGGTGGAAAAGAAAGGGCAGACGTAGAAGAAAAGCAAAAATAATAA
TAAGACAGTGGCAGCCAAACTACAGAAGAAGATGTAATATAGTGGGCTAC
CTCCCTATACTTATCTGTGGTGGAAATACTGTTTCTAGAAACTATGCCAC
ACACTCAGACGATACTAACTATCCAGGACCCTTTGGGGGAGGCATGACCA
CAGACAAATTCAGCCTTAGAATACTATATGATGAATACAAAAGATTTATG
AACTACTGGACAGCCTCAAATGAGGACCTAGATCTCTGTAGATATCTAGG
ATGCACTTTTTACTTCTTTAGACACCCTGAAGTAGACTTTATTATAAAAA
TAAACACCATGCCCCCATTCTTAGATACAACCATAACAGCACCTAGCATA
CACCCAGGCCTCATGGCCCTAGACAAAAGAGCCAGATGGATTCCTTCTCT
TAAAAATAGACCAGGTAAAAAACACTATATAAAAATTAGAGTAGGGGCTC
CTAAAATGTTCACAGATAAATGGTACCCTCAAACAGACCTCTGTGACATG
ACACTGCTAACTATCTATGCAACCGCAGCGGATATGCAATATCCGTTCGG
CTCACCACTAACTGACACTGTGGTTGTTAACTCCCAAGTTCTGCAATCCA
TGTATGATGAAACAATTAGCATATTACCTGATGAAAAAACTAAAAGAAAT
AGCCTTCTTACTTCTATAAGAAGCTACATACCTTTTTATAATACTACACA
AACAATAGCTCAATTAAAACCATTTGTAGATGCAGGAGGACACACAACAG
GCTCAACAACAACTACATGGGGACAACTATTAAACACAACTAAATTTACC
ACTACCACAACAACCACATACACATACCCTGGCACCACAAATACAGCAGT
AACATTTATAACAGCCAATGATACCTGGTACAGGGGAACAGCATATAAAG
ATAACATTAAAGATGTACCACAAAAAGCAGCACAATTATACTTTCAAACA
ACACAAAAACTACTAGGAAACACATTCCATGGCTCAGATGAAACACTTGA
ATACCATGCAGGCCTATACAGCTCTATCTGGCTATCACCAGGTAGATCCT
ACTTTGAAACACCAGGTGCATACACAGACATTAAATATAACCCTTTTACA
GACAGAGGAGAAGGCAACATGCTGTGGATAGACTGGCTAAGTAAAAAAAA
CATGAAATATGACAAAGTGCAAAGTAAGTGCCTAGTAGCAGACCTACCAC
TGTGGGCAGCAGCATATGGTTATGTAGAATTCTGCTCTAAAAGCACAGGA
GACACAAACATACACATGAATGCCAGACTACTAATAAGAAGTCCTTTTAC
AGACCCCCAGCTAATAGTACACACAGACCCCACTAAAGGCTTTGTACCCT
ATTCTTTAAACTTTGGAAATGGTAAAATGCCAGGAGGTAGCAGCAATGTT
CCCATAAGAATGAGAGCTAAGTGGTACCCCACTTTATCCCACCAACAAGA
AGTTCTAGAGGCCTTAGCACAGTCAGGACCCTTTGCTTATCACTCAGACA
TTAAAAAAGTATCTCTAGGCATAAAATACCGTTTTAAGTGGATCTGGGGT
GGAAACCCCGTTCGCCAACAGGTTGTTAGAAATCCCTGCAAGGAACCCCA
CTCCTCGGGCAATAGAGTCCCTAGAAGCATACAAATCGTTGACCCGAGAT
ACAACTCACCGGAACTTACCATCCATGCCTGGGACTTCAGACGTGGCTTC
TTTGGCCCGAAAGCTATTCAAAGAATGCAACAACAACCAACTGCTACTGA
ATTTTTTTCAGCAGGCCGCAAGAGACCCAGAAGGGACACAGAAGTGTATC
AGTCCGACCAAGAAAAGGAGCAAAAAGAAAGCTCGCTTTTCCCCCCAGTC
AAGCTCCTCCGAAGAGTCCCCCCGTGGGAGGACTCGGAACAGGAGCAAAG
CGGGTCGCAAAGCTCAGAGGAAGAGACGGCGACCCTCTCCCAGCAGCTCA
AACAGCAGCTGCAGCAGCAGCGAGTCTTGGGAGTCAAACTCAGACTCCTG
TTCAACCAAGTCCAAAAAATCCAACAAAATCAAGATATCAACCCTACCTT
GTTACCAAGGGGGGGGGATCTAGTATCCTTCTTTCAGGCTGTACCATAAA
TATGTTTCCAGACCCTAAACCTTACTGCCCCTCCAGCAATGACTGGAAAG
AAGAGTATGAGGCCTGTAAATATTGGGATAGACCTCCCAGACACAACCTT
AGAGACCCCCCCTTTTACCCCTGGGCCCCTAAAAACAATCCTTGCAATGT
AAGCTTTAAACTTGGCTTCAAATAAACTAGGCCGTGGGAGTTTCACTTGT
CGGTGTCTACCTCTATAAGTCACTAAGCACTCCGAGCGCAGCGAGGAGTG
CGACCCTTCCCCCTGGTGCAACGCCCTCGGCGGCCGCGCGCTACGCCTTC
GGCTGCGCGCGGCACCTCGGACCCCCGCTCGTGCTGACACGCTTGCGCGT
GTCAGACCACTTCGGGCTCGCGGGGGTCGGGAAATTTGCTAAACAGACTC
CGAGTTGCCATTGGACACTGTAGCTATGAATCAGTAACGAAAGTGAGTGG
GGCCAGACTTCGCCATAAGGCCTTTATCTTCTTGCCATTTGTCAGTATTG
GGGGTCGCCATAAACTTTGGGCTCCATTTTAGGCCTTCCGGACTACAAAA
ATCGCCATATTTGTGACGTCAGAGCCGCCATTTTAAGTCAGCTCTGGGGA
GGCGTGACTTCCAGTTCAAAGGTCATCCTCACCATAACTGGCACAAAATG
GCCGCCAACTTCTTCCGGGTCAAAGGTCACTGCTACGTCATAGGTGACGT
GGGGGGGGACCTACTTAAACACGGAAGTAGGCCCCGACACGTCACTGTCA
CGTGACAGTACGTCACAGCCGCCATTTTGTTTTACAAAATAGCCGACTTC
CTTCCTCTTTTTTAAAAAAAGGCGCCAAAAAACCGTCGGCGGGGGGGCCG
CGCGCTGCGCGCGCGGCCCCCGGGGGAGGCACAGCCTCCCCCCCCCGCGC
GCATGCGCGCGGGTCCCCCCCCCTCCGGGGGGCTCCGCCCCCCGGCCCCC
CCC (SEQ ID NO: 25)

[0396] Annotations:

| Putative Domain | Base range |
|---|---|
| TATA Box | 86-90 |
| Cap Site | 107-114 |
| Transcriptional Start Site | 114 |
| 5′ UTR Conserved Domain | 174-244 |
| ORF2 | 354-716 |
| ORF2/2 | 354-712; 2372-2873 |
| ORF2/3 | 354-712; 2565-3075 |
| ORF2t/3 | 354-400; 2565-3075 |
| ORF1 | 590-2899 |
| ORF1/1 | 590-712; 2372-2899 |
| ORF1/2 | 590-712; 2565-2873 |
| Three open-reading frame region | 2551-2870 |
| Poly(A) Signal | 3071-3076 |
| GC-rich region | 3733-3853 |

TABLE 8
Exemplary Anellovirus amino acid sequences
(Alphatorquevirus, Clade 4)
TTV-JA20 (Alphatorquevirus Clade 4)

| | |
|---|---|
| ORF2 | MWTPPRNDQQYLNWQWYTSVLSSHSAMCGCSDAIAHLNHLANLLRAPQNPPPPD |
| | NPRPLPVRALPAPPAAHEAAGDRAPWPMGGGGDAGGAGAGGDADHGGAAGGPA |
| | DADLLDAVAAAET (SEQ ID NO: 26) |
| ORF2/2 | MWTPPRNDQQYLNWQWYTSVLSSHSAMCGCSDAIAHLNHLANLLRAPQNPPPPD |
| | NPRPLPVRALPAPPAAHEAAGDRAPWPMGGGGDAGGAGAGGDADHGGAAGGPA |
| | DADLLDAVAAAETLLEIPARNPTPRAIESLEAYKSLTRDTTHRNLPSMPGTSDVASL |
| | ARKLFKECNNNQLLLNFFQQAARDPEGTQKCISPTKKRSKKKARFSPQSSSSEESPR |
| | GRTRNRSKAGRKAQRKRRRPSPSSSNSSCSSSESWESNSDSCSTKSKKSNKIKISTLP |
| | CYQGGGI (SEQ ID NO: 27) |
| ORF2/3 | MWTPPRNDQQYLNWQWYTSVLSSHSAMCGCSDAIAHLNHLANLLRAPQNPPPPD |
| | NPRPLPVRALPAPPAAHEAAGDRAPWPMGGGGDAGGAGAGGDADHGGAAGGPA |
| | DADLLDAVAAAETPQETQKGHRSVSVRPRKGAKRKLAFPPSQAPPKSPPVGGLGTG |
| | AKRVAKLRGRDGDPLPAAQTAAAAAASLGSQTQTPVQPSPKNPTKSRYQPYLVTK |
| | GGGSSILLSGCTINMFPDPKPYCPSSNDWKEEYEACKYWDRPPRHNLRDPPFYPWA |
| | PKNNPCNVSFKLGFK (SEQ ID NO: 28) |
| ORF2t/3 | MWTPPRNDQQYLNWQWPQETQKGHRSVSVRPRKGAKRKLAFPPSQAPPKSPPVG |
| | GLGTGAKRVAKLRGRDGDPLPAAQTAAAAAASLGSQTQTPVQPSPKNPTKSRYQP |
| | YLVTKGGGSSILLSGCTINMFPDPKPYCPSSNDWKEEYEACKYWDRPPRHNLRDPP |
| | FYPWAPKNNPCNVSFKLGFK (SEQ ID NO: 29) |
| ORF1 | MAYGWWRRRRRRWRRWRRRPWRRRWRTRRRRPARRRGRRRNVRRRRRGRWRR |
| | RYRRWKRKGRRRRKAKIIIRQWQPNYRRRCNIVGYLPILICGGNTVSRNYATHSDD |
| | TNYPGPFGGGMTTDKFSLRILYDEYKRFMNYWTASNEDLDLCRYLGCTFYFFRHPE |
| | VDFIIKINTMPPFLDTTITAPSIHPGLMALDKRARWIPSLKNRPGKKHYIKIRVGAPK |
| | MFTDKWYPQTDLCDMTLLTIYATAADMQYPFGSPLTDTVVVNSQVLQSMYDETISI |
| | LPDEKTKRNSLLTSIRSYIPFYNTTQTIAQLKPFVDAGGHTTGSTTTTWGQLLNTTKF |
| | TTTTTTTYTYPGTTNTAVTFITANDTWYRGTAYKDNIKDVPQKAAQLYFQTTQKLL |
| | GNTFHGSDETLEYHAGLYSSIWLSPGRSYFETPGAYTDIKYNPFTDRGEGNMLWID |
| | WLSKKNMKYDKVQSKCLVADLPLWAAAYGYVEFCSKSTGDTNIHMNARLLIRSPF |
| | TDPQLIVHTDPTKGFVPYSLNFGNGKMPGGSSNVPIRMRAKWYPTLSHQQEVLEAL |
| | AQSGPFAYHSDIKKVSLGIKYRFKWIWGGNPVRQQVVRNPCKEPHSSGNRVPRSIQI |
| | VDPRYNSPELTIHAWDFRRGFFGPKAIQRMQQQPTATEFFSAGRKRPRRDTEVYQS |
| | DQEKEQKESSLFPPVKLLRRVPPWEDSEQEQSGSQSSEEETATLSQQLKQQLQQQR |
| | VLGVKLRLLFNQVQKIQQNQDINPTLLPRGGDLVSFFQAVP (SEQ ID NO: 30) |
| ORF1/1 | MAYGWWRRRRRRWRRWRRRPWRRRWRTRRRRPARRRGRRRNVVRNPCKEPHSS |
| | GNRVPRSIQIVDPRYNSPELTIHAWDFRRGFFGPKAIQRMQQQPTATEFFSAGRKRP |
| | RRDTEVYQSDQEKEQKESSLFPPVKLLRRVPPWEDSEQEQSGSQSSEEETATLSQQL |
| | KQQLQQQRVLGVKLRLLFNQVQKIQQNQDINPTLLPRGGDLVSFFQAVP (SEQ ID |
| | NO: 31) |
| ORF1/2 | MAYGWWRRRRRRWRRWRRRPWRRRWRTRRRRPARRRGRRRNAARDPEGTQKCI |
| | SPTKKRSKKKARFSPQSSSSEESPRGRTRNRSKAGRKAQRKRRRPSPSSSNSSCSSSE |
| | SWESNSDSCSTKSKKSNKIKISTLPCYQGGGI (SEQ ID NO: 32) |

TABLE 9
Exemplary Anellovirus nucleic acid sequence
(Alphatorquevirus, Clade 5)
Name TTV-HD23a
Genus/Clade Alphatorquevirus, Clade 5
Accession Number FR751500.1
Full Sequence: 3758 bp

1 10 20 30 40 50
| | | | | |
AAAGTACGTCACTAACCACGTGACTCCCACAGGCCAACCACAGTCTACGT
CGTGCATTTCCTGGGCATGGTCTACATCATAATATAAGAAGGCGCACTTC
CGAATGGCTGAGTTTTCCACGCCCGTCCGCAGCGAGAACGCCACGGAGGG
AGATCCTCGCGTCCCGAGGGCGGGTGCCGGAGGTGAGTTTACACACCGCA
GTCAAGGGGCAATTCGGGCTCGGGACTGGCCGGGCCCTGGGCAAGGCTCT
TAAAAAATGCGCTTTCGCAGGGTTGCGGAGAAAAGGAAAGTGCTTCTGCA
AACTCTGCGAGCTGCAAAGCAGGCTAGGCGGCTTCTAGGTATGTGGCAGC
CCCCCGCGCACAATGTCCCCGGCATCGAGAGAAACTGGTACGAGAGCTGC
TTCAGGTCTCACGCTGCTGTTTGTGGCTGTGGCGACTTTGTTGGCCATAT
TAATCATTTGGCAACTACTCTGGGTCGTCCTCCGCGTCCTGGGCCCCCAG
GCGGACCCCGCACGCCGCAAATAAGAAACCTGCCAGCGCTCCCGGCGCCC
CAGGGCGAGCCCGGTGACAGAGCGCCATGGCGTGGGGTTTCTGGGGCCGA
CGCCGCCGGTGGAGACGGTGGAGAGCGCGGCGCAGACGGTGGAGACCCCG
GAGACGTAGGAGACGACGCCCTGCTCGCCGCTTTCGAGCTCGTCGAAGAG
TAAGGAGACGCGGGGGGAGGTGGCGCAGACGCTACAGAAAATGGCGACGG
GGCAGACGCAGACGGACTCACAGAAAAAAGATAATTATAAAACAGTGGCA
ACCAAACTTTATTAGACGCTGCTACATAATAGGATGCCTACCTCTCGTTT
TCTGTGGCGAAAATACAACCGCCCAGAACTATGCCACTCACTCAGACGAT
ATGATAAGCAAAGGACCGTACGGGGGGGGCATGACTACCACGAAATTCAC
TCTGAGAATACTGTACGACGAGTTTACCAGGTTTATGAACTTTTGGACTG
TCAGTAACGAAGACCTAGACCTGTGTAGATACGTGGGCTGCAAACTGATA
TTTTTTAAACACCCCACGGTGGACTTTATGGTACAGATAAACACTCAGCC
TCCTTTCTTAGACACAAGCCTCACCGCGGCCAGCATACACCCGGGCATCA
TGATGCTCAGCAAGAGACGCATATTAATACCCTCTCTAAAGACCCGGCCG
AGCAGAAAACACAGGGTGGTCGTCAGGGTGGGCGCCCCAAGACTTTTTCA
GGACAAGTGGTACCCCCAGTCAGACCTATGTGACACAGTTCTGCTTTCCA
TATTTGCAACCGCCCGCGACTTGCAATATCCGTTCGGCTCACCACTAACT
GACAACCCTTGCGTCAACTTCCAGATCCTGGGGCCCCAGTACAAAAAACA
CCTTAGTATTAGCTCCACTATGGATGATACTAACAAACAGCACTATAACA
GCAACTTATTTAATAAAACTGCACTATACAACACCTTTCAAACCATAGCC
CGGCTTAAAGAGACAGGACAAACTGCAAACATTAGTCCAAGTTGGAGTGA
AGTACAAAACACAAAACTACTAGATCACACAGGTGCTAATGCAACTGCCA
GCAGAGACACTTGGTACAAGGGAAACACATACAATGACTACATACAACAG
TTAGCAGAGAAAACAAGAGAAAGGTTTAAAAAAGCAACAATGTCAGCACT
ACCAAACTACCCCACAATAATGTCCACAGACTTATACGAATACCACTCAG
GCATATACTCCAGCATATTTCTATCAGCTGGCAGGAGCTACTTTGAAACC
ACTGGGGCCTACTCTGACATTATATACAACCCTTTGACAGACAAAGGCAC
AGGCAACATAATCTGGATAGACTACCTTACAAAAGACGACACAATCTTTG
TAAAAAACAAAAGCAAATGTGAGATAATGGACATGCCCCTGTGGGCGGCC
GGCACAGGATACACAGAGTTTTGTGCAAAGTACACAGGAGACTCTGCCAT
TATTTACAATGCCAGAATACTCATAAGATGCCCATACACTGAACCCATGC
TAATAGACCACTCAGACCCAAACAAAGGCTTTGTACCGTACTCATTTAAC
TTTGGCAACGGAAAGATGCCGGGAGGCAGCTCCAACGTGCCCATAAGAAT
GAGAGCCAAGTGGTACGTAAACATATTCCACCAAAAAGAAGTATTGGAGA
GCATAGTACAGTCCGGACCGTTCGGGTACAGGGGCGACATAAAATCAGCT
GTACTGTCCATGAAATACAGATTTCACTGGAAATGGGGCGGAAACCCTAT
ATCCAAACAGGTCGTCAGGAATCCCTGCTCCAACTCCAGCACCTCCGCGG
CCCATAGAGGACCTCGCAGCGTACAAGCGGTTGACCCGAAATACAATACC
CCAGAAGTCACTTGGCACTCGTGGGACATCAGACGAGGACTCTTTGGCAA
AGCAGGTATTAAAAGAATGCAACAAGAATCAGATGCTCTTTACGTTCCTG
CAGGACCACTCAAGAGGCCTCGCAGAGACACCAACGCCCAAGACCCGGAA
AAGCAAAACGAAAGCTCACGTTTCGGAGTCCAGCAGCGACTCCCGTGGGT
CCACTCCAGCCAAGAGACGCAAAGCTCCGAAGAAGAGACGCAGGCGCAGG
GGTCGGTACAAGACCAACTACTCCTCCAGCTCCGAGAGCAGCGAGTACTC
CGACTCCAGCTCCAACAACTCGCACCCCAAGTCCTCAAAGTTCAAGCAGG
ACACAGCCTACACCCCCTATTATCCTCCCAAGCATAAACAAAGCCTATAT
GTTTGAACCCCAGGGTCCTAAACCCATACAGGGGTACAACGATTGGCTAG
AGGAGTACACTAGTTGCAAGTTCCGGGACAGACCCCCGAGAATGCTACAC
ACAGACTTACCCTTTTACCCCTGGGCACCAAAACCCCAAGACCAAGTCAG
GGTAACCTTTAAACTCAACTTTCAATAAAAATTCTAGGCCGTGGGACTTT
CACTTGTCGGTGTCTGCTTCTTAAGGTCGCCAAGCACTCCGAGCGTCAGC
GAGGAGTGCGACCCCCCCCCTCGGTAGCAACGCCTTCGGAGCCGCGCGCT
ACGCCTTCGGCTGCGCGCGGCACCTCAGACCCCCCCTCCACCCGAAACGC
TTGCGCGTTTCGGACCTTCGGCGTCGGGGGGGTCGGGAGCTTTATTAAAC
AGACTCCGAGTTGCCATTGGACACTGGAGCTGTGAATCAGTAACGAAAGT
GAGTGGGGCCAGACTTCGCCATAGGGCCTTTATCTTCTCGCCATTGGATA
GTGTCCGGGGTTGCCGTAGGCTTCGGCCTCGTTTTTAGGCCTTCCGGACT
ACAAAAATGGCGGATTTTGTGACGTCACGGCCGCCATTTTAAGTAAGGCG
GAAGCAGCTCCACCCTCTCACATAATGGCGGCGGAGCACTCCCGGCTTGC
CCAAAATGGCGGGCAAGCTCTTCCGGGTCAAAGGTTGGCAGCTACGTCAC
AAGTCACCTGACTGGGGAGGAGTTACATCCCGGAAGTTCTCCTCGGTCAC
GTGACTGTACACGTGACTGCTACGTCATTGACGCCATCTTGTGTCACAAA
ATGGCGGTGCACTTCCGCTTTTTTGAAAAAAGGCGCGAAAAAACGGCGGC
GGCGGCGCGCGCGCTGCGCGCGCGCGCCGGGGGGGCGCCAGCGCCCCCCC
CCCCGCGCATGCACGGGTCCCCCCCCCCACGGGGGGCTCCGCCCCCCGGC
CCCCCCCC (SEQ ID NO: 33)

[0397] Annotations:

| Putative Domain | Base range |
|---|---|
| TATA Box | 83-87 |
| Cap Site | 104-111 |
| Transcriptional Start Site | 111 |
| 5′ UTR Conserved Domain | 171-241 |
| ORF2 | 341-703 |
| ORF2/2 | 341-699; 2311-2806 |
| ORF2/3 | 341-699; 2504-2978 |
| ORF2t/3 | 341-387; 2504-2978 |
| ORF1 | 577-2787 |
| ORF1/1 | 577-699; 2311-2787 |
| ORF1/2 | 577-699; 2504-2806 |
| Three open-reading frame region | 2463-2784 |
| Poly(A) Signal | 2974-2979 |
| GC-rich region | 3644-3758 |

TABLE 10
Exemplary Anellovirus amino acid sequences
(Alphatorquevirus, Clade 5)
TTV-HD23a (Alphatorquevirus Clade 5)

| | |
|---|---|
| ORF2 | MWQPPAHNVPGIERNWYESCFRSHAAVCGCGDFVGHINHLATTLGRPPRPGPPGGP |
| | RTPQIRNLPALPAPQGEPGDRAPWRGVSGADAAGGDGGERGADGGDPGDVGDDA |
| | LLAAFELVEE (SEQ ID NO: 34) |
| ORF2/2 | MWQPPAHNVPGIERNWYESCFRSHAAVCGCGDFVGHINHLATTLGRPPRPGPPGGP |
| | RTPQIRNLPALPAPQGEPGDRAPWRGVSGADAAGGDGGERGADGGDPGDVGDDA |
| | LLAAFELVEESSGIPAPTPAPPRPIEDLAAYKRLTRNTIPQKSLGTRGTSDEDSLAKQ |
| | VLKECNKNQMLFTFLQDHSRGLAETPTPKTRKSKTKAHVSESSSDSRGSTPAKRRK |
| | APKKRRRRRGRYKTNYSSSSESSEYSDSSSNNSHPKSSKFKQDTAYTPYYPPKHKQS |
| | LYV (SEQ ID NO: 35) |
| ORF2/3 | MWQPPAHNVPGIERNWYESCFRSHAAVCGCGDFVGHINHLATTLGRPPRPGPPGGP |
| | RTPQIRNLPALPAPQGEPGDRAPWRGVSGADAAGGDGGERGADGGDPGDVGDDA |
| | LLAAFELVEETTQEASQRHQRPRPGKAKRKLTFRSPAATPVGPLQPRDAKLRRRDA |
| | GAGVGTRPTTPPAPRAASTPTPAPTTRTPSPQSSSRTQPTPPIILPSINKAYMFEPQGPK |
| | PIQGYNDWLEEYTSCKFRDRPPRMLHTDLPFYPWAPKPQDQVRVTFKLNFQ (SEQ |
| | ID NO: 36) |
| ORF2t/3 | MWQPPAHNVPGIERNWTTQEASQRHQRPRPGKAKRKLTFRSPAATPVGPLQPRDA |
| | KLRRRDAGAGVGTRPTTPPAPRAASTPTPAPTTRTPSPQSSSRTQPTPPIILPSINKAY |
| | MFEPQGPKPIQGYNDWLEEYTSCKFRDRPPRMLHTDLPFYPWAPKPQDQVRVTFKL |
| | NFQ (SEQ ID NO: 37) |
| ORF1 | MAWGFWGRRRRWRRWRARRRRWRPRRRRRRRPARRFRARRRVRRRGGRWRRR |
| | YRKWRRGRRRRTHRKKIIIKQWQPNFIRRCYIIGCLPLVFCGENTTAQNYATHSDDM |
| | ISKGPYGGGMTTTKFTLRILYDEFTRFMNFWTVSNEDLDLCRYVGCKLIFFKHPTVD |
| | FMVQINTQPPFLDTSLTAASIHPGIMMLSKRRILIPSLKTRPSRKHRVVVRVGAPRLF |
| | QDKWYPQSDLCDTVLLSIFATARDLQYPFGSPLTDNPCVNFQILGPQYKKHLSISST |
| | MDDTNKQHYNSNLFNKTALYNTFQTIARLKETGQTANISPSWSEVQNTKLLDHTG |
| | ANATASRDTWYKGNTYNDYIQQLAEKTRERFKKATMSALPNYPTIMSTDLYEYHS |
| | GIYSSIFLSAGRSYFETTGAYSDIIYNPLTDKGTGNIIWIDYLTKDDTIFVKNKSKCEI |
| | MDMPLWAAGTGYTEFCAKYTGDSAIIYNARILIRCPYTEPMLIDHSDPNKGFVPYSF |
| | NFGNGKMPGGSSNVPIRMRAKWYVNIFHQKEVLESIVQSGPFGYRGDIKSAVLSMK |
| | YRFHWKWGGNPISKQVVRNPCSNSSTSAAHRGPRSVQAVDPKYNTPEVTWHSWDI |
| | RRGLFGKAGIKRMQQESDALYVPAGPLKRPRRDTNAQDPEKQNESSRFGVQQRLP |
| | WVHSSQETQSSEEETQAQGSVQDQLLLQLREQRVLRLQLQQLAPQVLKVQAGHSL |
| | HPLLSSQA (SEQ ID NO: 38) |
| ORF1/1 | MAWGFWGRRRRWRRWRARRRRWRPRRRRRRRPARRFRARRRVVRNPCSNSSTS |
| | AAHRGPRSVQAVDPKYNTPEVTWHSWDIRRGLFGKAGIKRMQQESDALYVPAGPL |
| | KRPRRDTNAQDPEKQNESSRFGVQQRLPWVHSSQETQSSEEETQAQGSVQDQLLLQ |
| | LREQRVLRLQLQQLAPQVLKVQAGHSLHPLLSSQA (SEQ ID NO: 39) |
| ORF1/2 | MAWGFWGRRRRWRRWRARRRRWRPRRRRRRRPARRFRARRRDHSRGLAETPTP |
| | KTRKSKTKAHVSESSSDSRGSTPAKRRKAPKKRRRRRGRYKTNYSSSSESSEYSDSS |
| | SNNSHPKSSKFKQDTAYTPYYPPKHKQSLYV (SEQ ID NO: 40) |

TABLE 11
Exemplary Anellovirus nucleic acid sequence
(Betatorquevirus)
Name TTMV-LY2
Genus/Clade Betatorquevirus
Accession Number JX134045.1
Full Sequence: 2797 bp

1 10 20 30 40 50
| | | | | |
TAATAAATATTCAACAGGAAAACCACCTAATTTAAATTGCCGACCACAAA
CCGTCACTTAGTTCCCCTTTTTGCAACAACTTCTGCTTTTTTCCAACTGC
CGGAAAACCACATAATTTGCATGGCTAACCACAAACTGATATGCTAATTA
ACTTCCACAAAACAACTTCCCCTTTTAAAACCACACCTACAAATTAATTA
TTAAACACAGTCACATCCTGGGAGGTACTACCACACTATAATACCAAGTG
CACTTCCGAATGGCTGAGTTTATGCCGCTAGACGGAGAACGCATCAGTTA
CTGACTGCGGACTGAACTTGGGCGGGTGCCGAAGGTGAGTGAAACCACCG
AAGTCAAGGGGCAATTCGGGCTAGTTCAGTCTAGCGGAACGGGCAAGAAA
CTTAAAATTATTTTATTTTTCAGATGAGCGACTGCTTTAAACCAACATGC
TACAACAACAAAACAAAGCAAACTCACTGGATTAATAACCTGCATTTAAC
CCACGACCTGATCTGCTTCTGCCCAACACCAACTAGACACTTATTACTAG
CTTTAGCAGAACAACAAGAAACAATTGAAGTGTCTAAACAAGAAAAAGAA
AAAATAACAAGATGCCTTATTACTACAGAAGAAGACGGTACAACTACAGA
CGTCCTAGATGGTATGGACGAGGTTGGATTAGACGCCCTTTTCGCAGAAG
ATTTCGAAGAAAAAGAAGGGTAAGACCTACTTATACTACTATTCCTCTAA
AGCAATGGCAACCGCCATATAAAAGAACATGCTATATAAAAGGACAAGAC
TGTTTAATATACTATAGCAACTTAAGACTGGGAATGAATAGTACAATGTA
TGAAAAAAGTATTGTACCTGTACATTGGCCGGGAGGGGGTTCTTTTTCTG
TAAGCATGTTAACTTTAGATGCCTTGTATGATATACATAAACTTTGTAGA
AACTGGTGGACATCCACAAACCAAGACTTACCACTAGTAAGATATAAAGG
ATGCAAAATAACATTTTATCAAAGCACATTTACAGACTACATAGTAAGAA
TACATACAGAACTACCAGCTAACAGTAACAAACTAACATACCCAAACACA
CATCCACTAATGATGATGATGTCTAAGTACAAACACATTATACCTAGTAG
ACAAACAAGAAGAAAAAAGAAACCATACACAAAAATATTTGTAAAACCAC
CTCCGCAATTTGAAAACAAATGGTACTTTGCTACAGACCTCTACAAAATT
CCATTACTACAAATACACTGCACAGCATGCAACTTACAAAACCCATTTGT
AAAACCAGACAAATTATCAAACAATGTTACATTATGGTCACTAAACACCA
TAAGCATACAAAATAGAAACATGTCAGTGGATCAAGGACAATCATGGCCA
TTTAAAATACTAGGAACACAAAGCTTTTATTTTTACTTTTACACCGGAGC
AAACCTACCAGGTGACACAACACAAATACCAGTAGCAGACCTATTACCAC
TAACAAACCCAAGAATAAACAGACCAGGACAATCACTAAATGAGGCAAAA
ATTACAGACCATATTACTTTCACAGAATACAAAAACAAATTTACAAATTA
TTGGGGTAACCCATTTAATAAACACATTCAAGAACACCTAGATATGATAC
TATACTCACTAAAAAGTCCAGAAGCAATAAAAAACGAATGGACAACAGAA
AACATGAAATGGAACCAATTAAACAATGCAGGAACAATGGCATTAACACC
ATTTAACGAGCCAATATTCACACAAATACAATATAACCCAGATAGAGACA
CAGGAGAAGACACTCAATTATACCTACTCTCTAACGCTACAGGAACAGGA
TGGGACCCACCAGGAATTCCAGAATTAATACTAGAAGGATTTCCACTATG
GTTAATATATTGGGGATTTGCAGACTTTCAAAAAAACCTAAAAAAAGTAA
CAAACATAGACACAAATTACATGTTAGTAGCAAAAACAAAATTTACACAA
AAACCTGGCACATTCTACTTAGTAATACTAAATGACACCTTTGTAGAAGG
CAATAGCCCATATGAAAAACAACCTTTACCTGAAGACAACATTAAATGGT
ACCCACAAGTACAATACCAATTAGAAGCACAAAACAAACTACTACAAACT
GGGCCATTTACACCAAACATACAAGGACAACTATCAGACAATATATCAAT
GTTTTATAAATTTTACTTTAAATGGGGAGGAAGCCCACCAAAAGCAATTA
ATGTTGAAAATCCTGCCCACCAGATTCAATATCCCATACCCCGTAACGAG
CATGAAACAACTTCGTTACAGAGTCCAGGGGAAGCCCCAGAATCCATCTT
ATACTCCTTCGACTATAGACACGGGAACTACACAACAACAGCTTTGTCAC
GAATTAGCCAAGACTGGGCACTTAAAGACACTGTTTCTAAAATTACAGAG
CCAGATCGACAGCAACTGCTCAAACAAGCCCTCGAATGCCTGCAAATCTC
GGAAGAAACGCAGGAGAAAAAAGAAAAAGAAGTACAGCAGCTCATCAGCA
ACCTCAGACAGCAGCAGCAGCTGTACAGAGAGCGAATAATATCATTATTA
AAGGACCAATAACTTTTAACTGTGTAAAAAAGGTGAAATTGTTTGATGAT
AAACCAAAAAACCGTAGATTTACACCTGAGGAATTTGAAACTGAGTTACA
AATAGCAAAATGGTTAAAGAGACCCCCAAGATCCTTTGTAAATGATCCTC
CCTTTTACCCATGGTTACCACCTGAACCTGTTGTAAACTTTAAGCTTAAT
TTTACTGAATAAAGGCCAGCATTAATTCACTTAAGGAGTCTGTTTATTTA
AGTTAAACCTTAATAAACGGTCACCGCCTCCCTAATACGCAGGCGCAGAA
AGGGGGCTCCGCCCCCTTTAACCCCCAGGGGGCTCCGCCCCCTGAAACCC
CCAAGGGGGCTACGCCCCCTTACACCCCC (SEQ ID NO: 41)

[0398] Annotations:

| Putative Domain | Base range |
|---|---|
| TATA Box | 237-243 |
| Cap Site | 260-267 |
| Transcriptional Start Site | 267 |
| 5′ UTR Conserved Domain | 323-393 |
| ORF2 | 424-723 |
| ORF2/2 | 424-719; 2274-2589 |
| ORF2/3 | 424-719; 2449-2812 |
| ORF1 | 612-2612 |
| ORF1/1 | 612-719; 2274-2612 |
| ORF1/2 | 612-719; 2449-2589 |
| Three open-reading frame region | 2441-2586 |
| Poly(A) Signal | 2808-2813 |
| GC-rich region | 2868-2929 |

TABLE 12
Exemplary Anellovirus amino acid sequences (Betatorquevirus)
TTMV-LY2 (Betatorquevirus)

| | |
|---|---|
| ORF2 | MSDCFKPTCYNNKTKQTHWINNLHLTHDLICFCPTPTRHLLLALAEQQETIEVSKQE |
| | KEKITRCLITTEEDGTTTDVLDGMDEVGLDALFAEDFEEKEG (SEQ ID NO: 42) |
| ORF2/2 | MSDCFKPTCYNNKTKQTHWINNLHLTHDLICFCPTPTRHLLLALAEQQETIEVSKQE |
| | KEKITRCLITTEEDGTTTDVLDGMDEVGLDALFAEDFEEKEGFNIPYPVTSMKQLRY |
| | RVQGKPQNPSYTPSTIDTGTTQQQLCHELAKTGHLKTLFLKLQSQIDSNCSNKPSNA |
| | CKSRKKRRRKKKKKYSSSSATSDSSSSCTESE (SEQ ID NO: 43) |
| ORF2/3 | MSDCFKPTCYNNKTKQTHWINNLHLTHDLICFCPTPTRHLLLALAEQQETIEVSKQE |
| | KEKITRCLITTEEDGTTTDVLDGMDEVGLDALFAEDFEEKEGARSTATAQTSPRMP |
| | ANLGRNAGEKRKRSTAAHQQPQTAAAAVQRANNIIIKGPITFNCVKKVKLFDDKPK |
| | NRRFTPEEFETELQIAKWLKRPPRSFVNDPPFYPWLPPEPVVNFKLNFTE (SEQ ID |
| | NO: 44) |
| ORF1 | MPYYYRRRRYNYRRPRWYGRGWIRRPFRRRFRRKRRVRPTYTTIPLKQWQPPYKR |
| | TCYIKGQDCLIYYSNLRLGMNSTMYEKSIVPVHWPGGGSFSVSMLTLDALYDIHKL |
| | CRNWWTSTNQDLPLVRYKGCKITFYQSTFTDYIVRIHTELPANSNKLTYPNTHPLM |
| | MMMSKYKHIIPSRQTRRKKKPYTKIFVKPPPQFENKWYFATDLYKIPLLQIHCTACN |
| | LQNPFVKPDKLSNNVTLWSLNTISIQNRNMSVDQGQSWPFKILGTQSFYFYFYTGA |
| | NLPGDTTQIPVADLLPLTNPRINRPGQSLNEAKITDHITFTEYKNKFTNYWGNPFNK |
| | HIQEHLDMILYSLKSPEAIKNEWTTENMKWNQLNNAGTMALTPFNEPIFTQIQYNP |
| | DRDTGEDTQLYLLSNATGTGWDPPGIPELILEGFPLWLIYWGFADFQKNLKKVTNID |
| | TNYMLVAKTKFTQKPGTFYLVILNDTFVEGNSPYEKQPLPEDNIKWYPQVQYQLEA |
| | QNKLLQTGPFTPNIQGQLSDNISMFYKFYFKWGGSPPKAINVENPAHQIQYPIPRNE |
| | HETTSLQSPGEAPESILYSFDYRHGNYTTTALSRISQDWALKDTVSKITEPDRQQLLK |
| | QALECLQISEETQEKKEKEVQQLISNLRQQQQLYRERIISLLKDQ (SEQ ID NO: 45) |
| ORF1/1 | MPYYYRRRRYNYRRPRWYGRGWIRRPFRRRFRRKRRIQYPIPRNEHETTSLQSPGE |
| | APESILYSFDYRHGNYTTTALSRISQDWALKDTVSKITEPDRQQLLKQALECLQISEE |
| | TQEKKEKEVQQLISNLRQQQQLYRERIISLLKDQ (SEQ ID NO: 46) |
| ORF1/2 | MPYYYRRRRYNYRRPRWYGRGWIRRPFRRRFRRKRRSQIDSNCSNKPSNACKSRK |
| | KRRRKKKKKYSSSSATSDSSSSCTESE (SEQ ID NO: 47) |

TABLE 13
Exemplary Anellovirus nucleic acid sequence
(Gammatorquevirus)
Name TTMDV-MD1-073
Genus/Clade Gammatorquevirus
Accession Number AB290918.1
Full Sequence: 3242 bp

1 10 20 30 40 50
| | | | | |
AGGTGGAGACTCTTAAGCTATATAACCAAGTGGGGTGGCGAATGGCTGAG
TTTACCCCGCTAGACGGTGCAGGGACCGGATCGAGCGCAGCGAGGAGGTC
CCCGGCTGCCCGTGGGCGGGAGCCCGAGGTGAGTGAAACCACCGAGGTCT
AGGGGCAATTCGGGCTAGGGCAGTCTAGCGGAACGGGCAAGAAACTTAAA
AATATTTCTTTTACAGATGCAAAACCTATCAGCCAAAGACTTCTACAAAC
CATGCAGATACAACTGTGAAACTAAAAACCAAATGTGGATGTCTGGCATT
GCTGACTCCCATGACAGTTGGTGTGACTGTGATACTCCTTTTGCTCACCT
CCTGGCTAGTATTTTTCCTCCTGGTCACACAGATCGCACACGAACCATCC
AAGAAATACTTACCAGAGATTTTAGGAAAACATGCCTTTCTGGTGGGGCC
GACGCAACAAATTCTGGTATGGCCGAAACTATAGAAGAAAAAAGAGAAGA
TTTCCAAAAAGAAGAAAAAGAAGATTTTACAGAAGAACAAAATATAGAAG
ACCTGCTCGCCGCCGTCGCAGACGCAGAAGGAAGGTAAGAAGAAAAAAAA
AAACTCTTATAGTAAGACAATGGCAGCCAGACTCTATTGTACTCTGTAAA
ATTAAAGGGTATGACTCTATAATATGGGGAGCTGAAGGCACACAGTTTCA
ATGTTCTACACATGAAATGTATGAATATACAAGACAAAAGTACCCTGGGG
GAGGAGGATTTGGTGTACAACTTTACAGCTTAGAGTATTTGTATGACCAA
TGGAAACTTAGAAATAATATATGGACTAAAACAAATCAACTCAAAGATTT
GTGTAGATACTTAAAATGTGTTATGACCTTTTACAGACACCAACACATAG
ATTTTGTAATTGTATATGAAAGACAACCCCCATTTGAAATAGATAAACTA
ACATACATGAAATATCATCCATATATGTTATTACAAAGAAAGCATAAAAT
AATTTTACCTAGTCAAACAACTAATCCTAGAGGTAAATTAAAAAAAAAGA
AAACTATTAAACCTCCCAAACAAATGCTCAGCAAATGGTTTTTTCAACAA
CAATTTGCTAAATATGATCTACTACTTATTGCTGCAGCAGCATGTAGTTT
AAGATACCCTAGAATAGGCTGCTGCAATGAAAATAGAATGATAACCTTAT
ACTGTTTAAATACTAAATTTTATCAAGATACAGAATGGGGAACTACAAAA
CAGGCCCCCCACTACTTTAAACCATATGCAACAATTAATAAATCCATGAT
ATTTGTCTCTAACTATGGAGGTAAAAAAACAGAATATAACATAGGCCAAT
GGATAGAAACAGATATACCTGGAGAAGGTAATCTAGCAAGATACTACAGA
TCAATAAGTAAAGAAGGAGGTTACTTTTCACCTAAAATACTGCAAGCATA
TCAAACAAAAGTAAAGTCTGTAGACTACAAACCTTTACCAATTGTTTTAG
GTAGATATAACCCAGCAATAGATGATGGAAAAGGCAACAAAATTTACTTA
CAAACTATAATGAATGGCCATTGGGGCCTACCTCAAAAAACACCAGATTA
TATAATAGAAGAGGTCCCTCTTTGGCTAGGCTTCTGGGGATACTATAACT
ACTTAAAACAAACAAGAACTGAAGCTATATTTCCACTACACATGTTTGTA
GTGCAAAGCAAATACATTCAAACACAACAAACAGAAACACCTAACAATTT
TTGGGCATTTATAGACAACAGCTTTATACAGGGCAAAAACCCATGGGACT
CAGTTATTACTTACTCAGAACAAAAGCTATGGTTTCCTACAGTTGCATGG
CAACTAAAAACCATAAATGCTATTTGTGAAAGTGGACCATATGTACCTAA
ACTAGACAATCAAACATATAGTACCTGGGAACTAGCAACTCATTACTCAT
TTCACTTTAAATGGGGTGGTCCACAGATATCAGACCAACCAGTTGAAGAC
CCAGGAAACAAAAACAAATATGATGTGCCCGATACAATCAAAGAAGCATT
ACAAATTGTTAACCCAGCAAAAAACATTGCTGCCACGATGTTCCATGACT
GGGACTACAGACGGGGTTGCATTACATCAACAGCTATTAAAAGAATGCAA
CAAAACCTCCCAACTGATTCATCTCTCGAATCTGATTCAGACTCAGAACC
AGCACCCAAGAAAAAAAGACTACTACCAGTCCTCCACGACCCACAAAAGA
AAACGGAAAAGATCAACCAATGTCTCCTCTCTCTCTGCGAAGAAAGTACA
TGCCAGGAGCAGGAAACGGAGGAAAACATCCTCAAGCTCATCCAGCAGCA
GCAGCAGCAGCAGCAGAAACTCAAGCACAACCTCTTAGTACTAATCAAGG
ACTTAAAAGTGAAACAAAGATTATTACAACTACAAACGGGGGTACTAGAA
TAACCCTTACCAGATTTAAACCAGGATTTGAGCAAGAAACTGAAAAAGAG
TTAGCACAAGCATTTAACAGACCCCCTAGACTGTTCAAAGAAGATAAACC
CTTTTACCCCTGGCTACCCAGATTTACACCCCTTGTAAACTTTCACCTTA
ATTTTAAAGGCTAGGCCTACACTGCTCACTTAGTGGTGTATGTTTATTAA
AGTTTGCACCCCAGAAAAATTGTAAAATAAAAAAAAAAAAAAAAAATAAA
AAATTGCAAAAATTCGGCGCTCGCGCGCGCTGCGCGCGCGAGCGCCGTCA
CGCGCCGGCGCTCGCGCGCCGCGCGTATGTGCTAACACACCACGCACCTA
GATTGGGGTGCGCGCGTAGCGCGCGCACCCCAATGCGCCCCGCCCTCGTT
CCGACCCGCTTGCGCGGGTCGGACCACTTCGGGCTCGGGGGGGCGCGCCT
GCGGCGCTTATTTACTAAACAGACTCCGAGTCGCCATTGGGCCCCCCCTA
AGCTCCGCCCCCCTCATGAATATTCATAAAGGAAACCACAAAATTAGAAT
TGCCGACCACAAACTGCCATATGCTAATTAGTTCCCCTTTTACACAGTAA
AAAGGGGAAGTGGGGGGGCAGAGCCCCCCCACACCCCCCGCGGGGGGGGC
AGAGCCCCCCCCGCACCCCCCCTACGTCACAGGCCACGCCCCCGCCGCCA
TCTTGGGTGCGGCAGGGCGGGGACTAAAATGGCGGGACCCAATCATTTTA
TACTTTCACTTTCCAATTAAAACCCGCCACGTCACACAAAAG (SEQ ID
NO: 48)

[0399] Annotations:

| Putative Domain | Base range |
|---|---|
| TATA Box | 21-25 |
| Cap Site | 42-49 |
| Transcriptional Start Site | 49 |
| 5′ UTR Conserved Domain | 117-187 |
| ORF2 | 283-588 |
| ORF2/2 | 283-584; 1977-2388 |
| ORF2/3 | 283-584; 2197-2614 |
| ORF1 | 432-2453 |
| ORF1/1 | 432-584; 1977-2453 |
| ORF1/2 | 432-584; 2197-2388 |
| Three open-reading frame region | 2186-2385 |
| Poly(A) Signal | 2676-2681 |
| GC-rich region | 3054-3172 |

TABLE 14
Exemplary Anellovirus amino acid sequences (Gammatorquevirus)
TTMDV-MD1-073 (Gammatorquevirus)

| | |
|---|---|
| ORF2 | MWMSGIADSHDSWCDCDTPFAHLLASIFPPGHTDRTRTIQEILTRDFRKTCLSGGAD |
| | ATNSGMAETIEEKREDFQKEEKEDFTEEQNIEDLLAAVADAEGR (SEQ ID NO: 49) |
| ORF2/2 | MWMSGIADSHDSWCDCDTPFAHLLASIFPPGHTDRTRTIQEILTRDFRKTCLSGGAD |
| | ATNSGMAETIEEKREDFQKEEKEDFTEEQNIEDLLAAVADAEGRYQTNQLKTQETK |
| | TNMMCPIQSKKHYKLLTQQKTLLPRCSMTGTTDGVALHQQLLKECNKTSQLIHLSN |
| | LIQTQNQHPRKKDYYQSSTTHKRKRKRSTNVSSLSAKKVHARSRKRRKTSSSSSSSS |
| | SSSSRNSSTTS (SEQ ID NO: 50) |
| ORF2/3 | MWMSGIADSHDSWCDCDTPFAHLLASIFPPGHTDRTRTIQEILTRDFRKTCLSGGAD |
| | ATNSGMAETIEEKREDFQKEEKEDFTEEQNIEDLLAAVADAEGRTSTQEKKTTTSPP |
| | RPTKENGKDQPMSPLSLRRKYMPGAGNGGKHPQAHPAAAAAAAETQAQPLSTNQ |
| | GLKSETKIITTTNGGTRITLTRFKPGFEQETEKELAQAFNRPPRLFKEDKPFYPWLPRF |
| | TPLVNFHLNFKG (SEQ ID NO: 51) |
| ORF1 | MPFWWGRRNKFWYGRNYRRKKRRFPKRRKRRFYRRTKYRRPARRRRRRRRKVR |
| | RKKKTLIVRQWQPDSIVLCKIKGYDSIIWGAEGTQFQCSTHEMYEYTRQKYPGGGG |
| | FGVQLYSLEYLYDQWKLRNNIWTKTNQLKDLCRYLKCVMTFYRHQHIDFVIVYER |
| | QPPFEIDKLTYMKYHPYMLLQRKHKIILPSQTTNPRGKLKKKKTIKPPKQMLSKWFF |
| | QQQFAKYDLLLIAAAACSLRYPRIGCCNENRMITLYCLNTKFYQDTEWGTTKQAPH |
| | YFKPYATINKSMIFVSNYGGKKTEYNIGQWIETDIPGEGNLARYYRSISKEGGYFSPK |
| | ILQAYQTKVKSVDYKPLPIVLGRYNPAIDDGKGNKIYLQTIMNGHWGLPQKTPDYII |
| | EEVPLWLGFWGYYNYLKQTRTEAIFPLHMFVVQSKYIQTQQTETPNNFWAFIDNSFI |
| | QGKNPWDSVITYSEQKLWFPTVAWQLKTINAICESGPYVPKLDNQTYSTWELATH |
| | YSFHFKWGGPQISDQPVEDPGNKNKYDVPDTIKEALQIVNPAKNIAATMFHDWDY |
| | RRGCITSTAIKRMQQNLPTDSSLESDSDSEPAPKKKRLLPVLHDPQKKTEKINQCLLS |
| | LCEESTCQEQETEENILKLIQQQQQQQQKLKHNLLVLIKDLKVKQRLLQLQTGVLE |
| | (SEQ ID NO: 52) |
| ORF1/1 | MPFWWGRRNKFWYGRNYRRKKRRFPKRRKRRFYRRTKYRRPARRRRRRRRKISD |
| | QPVEDPGNKNKYDVPDTIKEALQIVNPAKNIAATMFHDWDYRRGCITSTAIKRMQQ |
| | NLPTDSSLESDSDSEPAPKKKRLLPVLHDPQKKTEKINQCLLSLCEESTCQEQETEEN |
| | ILKLIQQQQQQQQKLKHNLLVLIKDLKVKQRLLQLQTGVLE (SEQ ID NO: 53) |
| ORF1/2 | MPFWWGRRNKFWYGRNYRRKKRRFPKRRKRRFYRRTKYRRPARRRRRRRRKISD |
| | QPVEDPGNKNKYDVPDTIKEALQIVNPAKNIAATMFHDWDYRRGCITSTAIKRMQQ |
| | NLPTDSSLESDSDSEPAPKKKRLLPVLHDPQKKTEKINQCLLSLCEESTCQEQETEEN |
| | ILKLIQQQQQQQQKLKHNLLVLIKDLKVKQRLLQLQTGVLE (SEQ ID NO: 54) |

[0400] In some embodiments, a synthetic curon comprises a minimal Anellovirus genome, e.g., as identified according to the method described in Example 9. In some embodiments, a synthetic curon comprises an Anellovirus sequence, or a portion thereof, as described in Example 13.

[0401] In some embodiments, a synthetic curon comprises a genetic element comprising a consensus Anellovirus motif, e.g., as shown in Table 14-1. In some embodiments, a synthetic curon comprises a genetic element comprising a consensus Anellovirus ORF1 motif, e.g., as shown in Table 14-1. In some embodiments, a synthetic curon comprises a genetic element comprising a consensus Anellovirus ORF1/1 motif, e.g., as shown in Table 14-1. In some embodiments, a synthetic curon comprises a genetic element comprising a consensus Anellovirus ORF1/2 motif, e.g., as shown in Table 14-1. In some embodiments, a synthetic curon comprises a genetic element comprising a consensus Anellovirus ORF2/2 motif, e.g., as shown in Table 14-1. In some embodiments, a synthetic curon comprises a genetic element comprising a consensus Anellovirus ORF2/3 motif, e.g., as shown in Table 14-1. In some embodiments, a synthetic curon comprises a genetic element comprising a consensus Anellovirus ORF2t/3 motif, e.g., as shown in Table 14-1. In some embodiments, X, as shown in Table 14-1, indicates any amino acid. In some embodiments, Z, as shown in Table 14-1, indicates glutamic acid or glutamine. In some embodiments, B, as shown in Table 14-1, indicates aspartic acid or asparagine. In some embodiments, J, as shown in Table 14-1, indicates leucine or isoleucine.

TABLE 14-1
Consensus motifs in open reading frames
(ORFs) of Anelloviruses

| | Open | | | |
|---|---|---|---|---|
| Consensus | Reading | | | SEQ ID |
| Threshold | Frame | Position | Motif | NO: |
| 50 | ORF1 | 79 | LIJRQWQPXXIRRCXIXG | 55 |
| | | | YXPLIXC | |
| 50 | ORF1 | 111 | NYXXHXD | 56 |
| 50 | ORF1 | 135 | FSLXXLYDZ | 57 |
| 50 | ORF1 | 149 | NXWTXSNXDLDLCRYXGC | 58 |
| 50 | ORF1 | 194 | TXPSXHPGXMXLXKHK | 59 |
| 50 | ORF1 | 212 | IPSLXTRPXG | 60 |
| 50 | ORF1 | 228 | RIXPPXLFXDKWYFQXDL | 61 |
| 50 | ORF1 | 250 | LLXIXATA | 62 |
| 50 | ORF1 | 260 | LXXPFXSPXTD | 63 |
| 50 | ORF1 | 448 | YNPXXDKGXGNXIW | 64 |
| 50 | ORF1 | 519 | CPYTZPXL | 65 |
| 50 | ORF1 | 542 | XFGXGXMP | 66 |
| 50 | ORF1 | 569 | HQXEVXEX | 67 |
| 50 | ORF1 | 600 | KYXFXFXWGGNP | 68 |
| 50 | ORF1 | 653 | HSWDXRRG | 69 |
| 50 | ORF1 | 666 | AIKRXQQ | 70 |
| 50 | ORF1 | 750 | XQZQXXLR | 71 |
| 50 | ORF1/1 | 73 | PRXJQXXDP | 72 |
| 50 | ORF1/1 | 91 | HSWDXRRG | 73 |
| 50 | ORF1/1 | 105 | AIKRXQQ | 74 |
| 50 | ORF1/1 | 187 | QZQXXLR | 75 |
| 50 | ORF1/2 | 97 | KXKRRRR | 76 |
| 50 | ORF2/2 | 158 | PIXSLXXYKXXTR | 77 |
| 50 | ORF2/2 | 189 | LAXQLLKECXKN | 78 |
| 50 | ORF2/3 | 39 | HLNXLA | 79 |
| 50 | ORF2/3 | 272 | DRPPR | 80 |
| 50 | ORF2/3 | 281 | DXPFYPWXP | 81 |
| 50 | ORF2/3 | 300 | VXFKLXF | 82 |
| 50 | ORF2t/3 | 4 | WXPPVHBVXGIERXW | 83 |
| 50 | ORF2t/3 | 37 | AKRKLX | 84 |
| 50 | ORF2t/3 | 140 | PSSXDWXXEY | 85 |
| 50 | ORF2t/3 | 156 | DRPPR | 86 |
| 50 | ORF2t/3 | 167 | PFYPW | 87 |
| 50 | ORF2t/3 | 183 | NVXFKLXF | 88 |
| 50 | ORF1 | 84 | JXXXXWQPXXXXXCXIXG | 89 |
| | | | XXXJWQP | |
| 50 | ORF1 | 149 | NXWXXXNXXXXLXRY | 90 |
| 50 | ORF1 | 448 | YNPXXDXG | 91 |

### Genetic Element

[0402] In some embodiments, the curon comprises a genetic element. In some embodiments, the genetic element has one or more of the following characteristics: is substantially non-integrating with a host cell's genome, an episomal nucleic acid, a single stranded DNA, is circular, is about 1 to 10 kb, exists within the nucleus of the cell, can be bound by endogenous proteins, and produces a microRNA that targets host genes. In one embodiment, the genetic element is a substantially non-integrating DNA. In some embodiments, the genetic element has at least about 70%, 75%, 80%, 8%, 90%, 95%, 96%, 97%, 98%, 99%, or 100% sequence identity to an Anellovirus sequence, e.g., as described herein (e.g., as described in any of Tables 1-14), or a fragment thereof. In embodiments, the genetic element comprises a sequence encoding an exogenous effector (e.g., a payload), e.g., a polypeptide effector (e.g., a protein) or nucleic acid effector (e.g., a non-coding RNA, e.g., a miRNA, siRNA, mRNA, lncRNA, RNA, DNA, an antisense RNA, gRNA).

[0403] In some embodiments, the genetic element has a length less than 20 kb (e.g., less than about 19 kb, 18 kb, 17 kb, 16 kb, 15 kb, 14 kb, 13 kb, 12 kb, 11 kb, 10 kb, 9 kb, 8 kb, 7 kb, 6 kb, 5 kb, 4 kb, 3 kb, 2 kb, lkb, or less). In some embodiments, the genetic element has, independently or in addition to, a length greater than 1000b (e.g., at least about 1.1 kb, 1.2 kb, 1.3 kb, 1.4 kb, 1.5 kb, 1.6 kb, 1.7 kb, 1.8 kb, 1.9 kb, 2 kb, 2.1 kb, 2.2 kb, 2.3 kb, 2.4 kb, 2.5 kb, 2.6 kb, 2.7 kb, 2.8 kb, 2.9 kb, 3 kb, 3.1 kb, 3.2 kb, 3.3 kb, 3.4 kb, 3.5 kb, 3.6 kb, 3.7 kb, 3.8 kb, 3.9 kb, 4 kb, 4.1 kb, 4.2 kb, 4.3 kb, 4.4 kb, 4.5 kb, 4.6 kb, 4.7 kb, 4.8 kb, 4.9 kb, 5 kb, or greater). In some embodiments, the genetic element has a length of about 2.5-4.6, 2.8-4.0, 3.0-3.8, or 3.2-3.7 kb.

[0404] In some embodiments, the genetic element comprises one or more of the features described herein, e.g., a sequence encoding a substantially non-pathogenic protein, a protein binding sequence, one or more sequences encoding a regulatory nucleic acid, one or more regulatory sequences, one or more sequences encoding a replication protein, and other sequences.

[0405] In one embodiment, the invention includes a genetic element comprising a nucleic acid sequence (e.g., a DNA sequence) encoding (i) a substantially non-pathogenic exterior protein, (ii) an exterior protein binding sequence that binds the genetic element to the substantially non-pathogenic exterior protein, and (iii) a regulatory nucleic acid. In such an embodiment, the genetic element may comprise one or more sequences with at least about 60%, 70% 80%, 85%, 90% 95%, 96%, 97%, 98% and 99% nucleotide sequence identity to any one of the nucleotide sequences to a native viral sequence.

[0406] Proteins, e.g., Substantially Non-Pathogenic Protein

[0407] In some embodiments, the genetic element comprises a sequence that encodes a protein, e.g., a substantially non-pathogenic protein. In embodiments, the substantially non-pathogenic protein is a major component of the proteinaceous exterior of the curon. Multiple substantially non-pathogenic protein molecules may self-assemble into an icosahedral formation that makes up the proteinaceous exterior. In embodiments, the protein is present in the proteinaceous exterior.

[0408] In some embodiments, the protein, e.g., substantially non-pathogenic protein and/or proteinaceous exterior protein, comprises one or more glycosylated amino acids, e.g., 2, 3, 4, 5, 6, 7, 8, 9, 10, or more.

[0409] In some embodiments, the protein, e.g., substantially non-pathogenic protein and/or proteinaceous exterior protein comprises at least one hydrophilic DNA-binding region, an arginine-rich region, a threonine-rich region, a glutamine-rich region, a N-terminal polyarginine sequence, a variable region, a C-terminal polyglutamine/glutamate sequence, and one or more disulfide bridges.

[0410] In some embodiments, the genetic element comprises a nucleotide sequence encoding a capsid protein or a fragment of a capsid protein or a sequence having at least about 60%, 65%, 70%, 75%, 80%, 85%, 90% 95%, 96%, 97%, 98%, 99%, or 100% nucleotide sequence identity to any one of the nucleotide sequences encoding a capsid protein described herein, e.g., as listed in any of Tables 1-16 or 19. In some embodiments, the genetic element comprises a nucleotide sequence encoding a capsid protein or a functional fragment of a capsid protein or a nucleotide sequence having at least about 60%, 70% 80%, 85%, 90% 95%, 96%, 97%, 98%, 99%, or 100% sequence identity to any one of the nucleotide sequences described herein, e.g., as listed in any of Tables 1-16 or 19. In some embodiments, the substantially non-pathogenic protein comprises a capsid protein or a functional fragment of a capsid protein that is encoded by a capsid nucleotide sequence or a sequence having at least about 60%, 65%, 70%, 75%, 80%, 85%, 90% 95%, 96%, 97%, 98%, 99%, or 100% nucleotide sequence identity to any one of the nucleotide sequences described herein, e.g., as listed in any of Tables 1, 3, 5, 7, 9, 11, 13, or 15.

TABLE 15
Examples of viral sequences that encode viral proteins, e.g., capsid proteins.

| Accession # | Accession # | | |
|---|---|---|---|
| (protein | (nucleotide | | |
| sequence) | sequence) | Sequence | SEQ ID NO: |
| AAD45640.1 | AF122917.1 | ATGCACTTTTCTAGGATATCCAGGAAGAAAAGGCTACTGCTACTGC | 92 |
| | | ACACAGTGCCAACTCCACAGAAAACTCTCAAACTTTTAAGAGGTAT | |
| | | GTGGAGTCCTCCCACTGACGATGAACGTGTCCGCGAGCGAAAATG | |
| | | GTTTCTCGCAACTGTCTATTCTCACTCTGCTTTCTGTGGCTGCAAT | |
| | | GATCCTGTCGGTCACCTCTGTCGCCTGGCTACTCTCTCTAACCGT | |
| | | CCGGAGAACCCGGGACCCTCCGGGGGACGTCGTGCTCCTTCGAT | |
| | | CGGGGTCCTACCCGCTCTCCCGGCTGCTACCGAGCAGCCAGGTG | |
| | | ATCGAGCACCATGGCCTATGGGTGGTGGAGGAGACGCCGCAGAA | |
| | | GGTGGAAGAGATGGAGGAGAAGGCCCAGGTGGAGACGCCCATGG | |
| | | AGGACCCGCAGACGCAGACCTGCTAGACGCCGTGGACGCCGCGG | |
| | | AACAGTAA | |
| AAD45641.1 | AF122917.2 | ATGGCCTATGGGTGGTGGAGGAGACGCCGCAGAAGGTGGAAGAG | 93 |
| | | ATGGAGGAGAAGGCCCAGGTGGAGACGCCCATGGAGGACCCGCA | |
| | | GACGCAGACCTGCTAGACGCCGTGGACGCCGCGGAACAGTAAGG | |
| | | AGACGGAGGCGCGGGAGGTGGAGGAGGCGCTATAGGAGGTGGA | |
| | | GGAGAAAGGGCAGACGCAGGAGAAAAAAGAAACTTATAATAAGAC | |
| | | AATGGCAGCCAAACTATACCAGAAAGTGCAACATAGTAGGCTACAT | |
| | | GCCAGTAATCATGTGTGGAGAAAACACTCTAATAAGAAACTATGCC | |
| | | ACACACGCAGACGACTGCTACTGGCCGGGACCCTTTGGGGGCGG | |
| | | CATGGCCACCCAGAAATTCACACCCAGAATCCTGTACGATGACTA | |
| | | CAAGAGGTTTATGAACTACTGGACCTCCTCAAACGAGGACCTAGA | |
| | | CCTCTGTAGATACAGGGGAGTCACCCTGTACTTTTTCAGACACCCA | |
| | | GATGTAGACTTTATCATCTTAATAAACACCACACCTCCATTCGTAGA | |
| | | TACAGAGATCACAGGACCCAGCATACATCCGGGCATGATGGCCCT | |
| | | GAACAAGAGAGCCAGGTTCATCCCCAGCCTAAAGACTAGACCTGG | |
| | | CAGAAGACACATAGTAAAGATTAGAGTGGGGGCCCCCAAACTGTA | |
| | | CGAGGACAAGTGGTACCCCCAGTCAGAACTCTGTGACGTGCCCCT | |
| | | GCTAACCGTCTACGCGACCGCAGCGGATATGCAATATCCGTTCGG | |
| | | CTCACCACTAACTGACACTCCTGTTGTAACCTTCCAAGTGTTGCGC | |
| | | AGCATGTACAACGACGCCCTCAGCACACTTCCCTCTAACTTTGAAA | |
| | | ACGCAAGCAGTCCAGGCCAAAAACTTTACAAAGAAATATCTACATA | |
| | | TTTACCATACTACAACACCACAGAAACAATAGCACAACTAAAGAGA | |
| | | TATGTAGAAAATACAGAAAAAAATGGCACAACGCCAAACCCGTGG | |
| | | CAATCAAAATATGTAAACACTACTGCCTTCACCACTGCACTAAATGT | |
| | | TACAACTGAAAAACCATACACCACCTTCTCAGACAGCTGGTACAGG | |
| | | GGCACAGTATACAAAGAAACAATCACTGAAGTGCCACTTGCCGCA | |
| | | GCAAAACTCTATCAAAACCAAACAAAAAAGCTGCTGTCTACAACAT | |
| | | TTACAGGAGGGTCCGAGTACCTAGAATACCATGGAGGCCTGTACA | |
| | | GCTCCATATGGCTATCAGCAGGCCGATCCTACTTTGAAACAAAGG | |
| | | GAGCATACACAGACATCTGCTACAACCCCTACACAGACAGAGGAG | |
| | | AGGGCAACATGGTGTGGATAGACTGGCTATCAAAAACAGACTCCA | |
| | | GATATGACAAAACCCGCAGCAAATGCCTTATAGAAAAGCTACCCCT | |
| | | ATGGGCAGCAGTATACGGGTACCCAGAATACTGTGCCAAGAGCAC | |
| | | CGGAGACTCAAACATAGACATGAACGCCAGAGTAGTAATAAGGTG | |
| | | CCCCTACACCGTCCCCCAGATGATAGACACCAGCGACGAACTAAG | |
| | | GGGCTTCATAGTATACAGCTTTAACTTTGGCAGGGGCAAAATGCC | |
| | | CGGAGGCAGCAGCGAGGTACCCATAAGAATGAGAGCCAAGTGGT | |
| | | ACCCCTGCCTGTTTCACCAAAAAGAAGTTCTAGAAGCCTTGGGACA | |
| | | GTCGGGCCCCTTCGCCTACCACTGCGACCAAAAAAAAGCAGTGCT | |
| | | AGGTCTAAAATACAGATTTCACTGGATATGGGGCGGAAGCCCCGT | |
| | | GTTTCCACAGGTTGTTAGAAACCCCTGCAAAGACACACACGGTTC | |
| | | CTCGGGCCCTAGAAAGCCTCGCTCAATACAAATCATTGACCCGAA | |
| | | GTACAACACACCAGAGCTCACAATCCACGCGTGGGATTTCAGACG | |
| | | TGGCTTCTTTGGCTCAAAAGCTATTAAAAGAATGCAACAACAACCA | |
| | | ACAGATGCTGAACTTCTTCCACCAGGCCGCAAGAGGAGCAGGCGA | |
| | | GACACAGAAGCCCTCCAAAGCAGCCAAGAAAAGCAAAAAGAAAGC | |
| | | TTACTTTTCAAACACCTCCAGCTCCAGCGACGAATACCCCCATGGG | |
| | | AAAGCTCGCAGGCCTCGCAGACAGAGGCAGAGAGCGAAAAAGAG | |
| | | CAAGAGGGCAGTCTCTCCCAGCAGCTCCGAGAGCAGCTTTACCAG | |
| | | CAAAAGCTCCTCGGCAAGCAGCTCAGGGAAATGTTCCTACAACTC | |
| | | CACAAAATCCAACAAAATCAACACGTCAACCCTACCTTATTGCCAA | |
| | | GGGATCAGGCTTTAATCTGCTGGTCTCAGATTCAGTAA | |
| AAD45642.1 | AF122917.1 | ATGTTTGGAGACCCTAAACCATACAAACCCTCCAGCAACGACTGG | 94 |
| | | AAAGAGGAGTACGAGGCCGCTAAGTATTGGGACAGGCCCCCCAG | |
| | | ATCTAACCTTAGAGATAACCCCTTCTATCCCTGGGCCCCCCCAAGC | |
| | | AATCCCTACAAAGTAAACTTTAAACTAGGCTTCCAATAA | |
| AAD45646.1 | AF122919.1 | ATGCACTTTTCTAGGATATCCAGAAAGAAAAGGCTACTGCTACTGC | 95 |
| | | AAACAGAGCCAGCTCCACAGAAGACTCTCAAACTTTTAAAAGGTAT | |
| | | GTGGAGTCCTCCCACTGACGATGAACGTGTCCGCGAGCGAAAATG | |
| | | GTTCCTCGCCACTGTTTATTCTCACTCTGCTTTCTGTGGCTGCAAT | |
| | | GATCCTGTCGGCCACCTCTGTCGCTTGGCTACTCTATCTAACCGTC | |
| | | CGGAGAACCCGGGACCCTCCGGGGGACGTCGTGCTCCTTCGATC | |
| | | GGGATCCTACCCGCTCTCCCGGCTGCTACCGAGCAGCCCGGTGA | |
| | | TCGAGCACCATGGCCTATGGGTGGTGGAGGAGACGCCGCAGAAG | |
| | | GTGGAAGAGATGGAGGAGAAGGCCCAGGTGGAGACGCCCATGGA | |
| | | GGACCCGCAGACGCAGACCTGCTAGACGCCGTGGACGCCGCAGA | |
| | | ACAGTAA | |
| AAD45647.1 | AF122919_2 | ATGGCCTATGGGTGGTGGAGGAGACGCCGCAGAAGGTGGAAGAG | 96 |
| | | ATGGAGGAGAAGGCCCAGGTGGAGACGCCCATGGAGGACCCGCA | |
| | | GACGCAGACCTGCTAGACGCCGTGGACGCCGCAGAACAGTAAGG | |
| | | AGACGGAGGCGCGGGAGGTGGAGGAGGCGCTATAGGAGGTGGA | |
| | | GGAGAAAGGGCAGACGCGGGAGAAAAAAGAAACTTATAATAAAAC | |
| | | AATGGCAGCCAAACTATACCAGAGAGTGCAACATAGTAGGCTACA | |
| | | TGCCAGTAATCATGTGTGGAGAGAACACTCTAATAAGAAACTATGC | |
| | | CACACACGCAGACGACTGCTACTGGCCGGGACCCTTTGGGGGCG | |
| | | GCATGGCCACCCAGAAATTCACACTCAGAATCCTGTACGATGACTA | |
| | | CAAGAGGTTTATGAACTACTGGACCTCCTCAAACGAGGACCTAGA | |
| | | CCTCTGTAGATACAGGGGAGTCACCCTGTACTTTTTCAGAAACCCA | |
| | | GATGTAGACTTTATCATCCTCATAAACACCACACCTCCGTTCGTAG | |
| | | ATACAGAGATCACAGGACCCAGCATACATCCGGGCATGATGGCCC | |
| | | TCAACAAAAGAGCCAGGTTCATCCCCAGCCTAAAAACTAGACCTG | |
| | | GCAGAAGACACATAGTAAAGATTAAAGTGGGGGCCCCCAAACTGT | |
| | | ACGAGGACAAGTGGTACCCCCAGTCAGAACTCTGTGACATGCCCC | |
| | | TACTAACCGTCTACGCCACCGCAGCGGATATGCAATATCCGTTCG | |
| | | GCTCACCACTAACTGACACTCCTGTTGTAACCTTCCAAGTGTTGCG | |
| | | CAGCATGTACAACGACGCCCTTAGCATACTTCCCTCTAACTTTCAA | |
| | | AGCCCAGACAGTCCAGGCCAAAAACTTTACGAACAAATATCTAAGT | |
| | | ATTTACCATACTACAACACCACAGAAACAATGGCACAACTAAAGAG | |
| | | ATATATAGAAAATACAGAAAAAAATACCACATCGCCAAACCCATGG | |
| | | CAAACAAAATATGTAAACACTACTGCCTTCACCACTCCACAAACTG | |
| | | TTACAACTCAACAGCCATACACCAGCTTCTCAGACAGCTGGTACAG | |
| | | GGGCACAGTATACACAAACGAAATCACTAAGGTGCCACTTGCCGC | |
| | | AGCAAAAGTGTATGAAACTCAAACAAAAAACCTGCTGTCTACAACA | |
| | | TTTACAGGAGGGTCAGAGTACCTAGAATACCATGGAGGCCTGTAC | |
| | | AGCTCCATATGGCTATCAGCAGGCCGATCCTACTTTGAAACAAAG | |
| | | GGAGCATACACAGACATCTGCTACAACCCCTACACAGACAGAGGA | |
| | | GAGGGCAACATGGTGTGGATAGACTGGCTATCAAAAACAGACTCC | |
| | | AGATATGACAAAACCCGCAGCAAATGCCTTATAGAAAAGCTACCCC | |
| | | TATGGGCAGCAGTATACGGGTACGCAGAATACTGTGCCAAGAGCA | |
| | | CCGGAGACTCAAACATAGACATGAACGCCAGAGTAGTAATTAGGT | |
| | | GCCCCTACACCACCCCCCAGATGATAGACACCAGCGACGAACTAA | |
| | | GGGGCTTCATAGTATACAGCTTTAACTTTGGCAGGGGCAAAATGC | |
| | | CCGGAGGCAGCAGCGAGGTACCCATTAGAATGAGAGCCAAGTGG | |
| | | TACCCCTGCCTACTTCACCAAAAAGGAGTTCTAGAAGCCTTAGGAC | |
| | | AGTCAGGCCCCTTCGCCTACCACCGCGACCAAAAAAAAGCAGTGC | |
| | | TAGGTCTAAAATACAGATTTCACTGGATATGGGGCGGAAACCCCG | |
| | | TGTTTCCACAGGTTGTTAGAAACCCCTGCAAAGACACACACGGTTC | |
| | | CTCGGGCCCTAGAAAGCCTCGCTCAATACAAATCATTGACCCGAA | |
| | | GTACAACACACCAGAGCTCACAATCCACGCGTGGGATTTCAGACG | |
| | | TGGCTTCTTTGGCCCAAAAGCTATTAAGAGAATGCAACAACAACCA | |
| | | ACAGATGCTGAACTTCTTCCACCAGGCCGCAAGAGGAGCAGGCGA | |
| | | GACACCGAAGCCCTCCAAAGCAGCCAAGAAAAGCAGAAAGAAAGC | |
| | | TTACTTTTCAAACAGCTCCAGCTCCGGCGACGAGTACCCCCGTGG | |
| | | GAAAGCTCGCAGGCCTCGCAGACAGAGGCAGAGAGCGAAAAAGA | |
| | | GCAAGAGGACAGTCTCTCCCAGCAGCTCCGAGAGCAGCTTCACCA | |
| | | GCAAAAGCTCCTCGGCAAGCAGCTCAGGGAAATGTTCCTACAACT | |
| | | CCACAAAATCCAACAAAATCAACACGTCAACCCTACCCTATTGCCA | |
| | | AAAGATCAGGCTTTAATATGCTGGTCTCAGATTCAGTAA | |
| AAD45648.1 | AF122919_3 | ATGTTCGGAGACCCTAAACCATACAAACCCTCCAGCAACGACTGG | 97 |
| | | AAAGAGGAGTACGAGGCCGCTAAATATTGGGACAGGCCCCCCAG | |
| | | ATTTGACCTTAGAGATAAGCCCTTCTATCCCTGGGCCCCCCCAAG | |
| | | CAATCCCTACAAAGTAAACTTTAAACTAGGCTTTCAATAA | |
| AAG16247.1 | AF298585_1 | ATGGCTGAGTTTTCCACGCCCGTCCGCAGCGGTGAAGCCACGGA | 98 |
| | | GGGACCTCAGCGCGTCCCGAGGGCGGGTGCCGAAGGTGAGTTTA | |
| | | CACACCGCAGTCAAGGGGCAATTCGGGCTCGGGACTGGCCGGGC | |
| | | TATGGGCAAGGCTCTTAA | |
| AAG16248.1 | AF298585_2 | ATGTTTCTCGGTAAACTTTACAGAAAGAAAAGGAAAGTGCTTCTGC | 99 |
| | | AGACTGTGCCAGACCCACAGAAGGCTAGGCGGCTTCTGATTATGT | |
| | | GGCAGCCCCCCGTGCACAAAGTACCCGGGATCGAGAGAAACTGG | |
| | | TACGAGAGTTGCTTTCGATCCCATGCTGCTGTGTGTGGCTGTGGC | |
| | | GACTTTGTTGGCCATCTTAATCATCTGGCAGCTACTCTGGGTCGCC | |
| | | CTCCGCGTTCTCGGCACCCCGGGGGCCCCGGCACTCCGCAGATA | |
| | | AGAAACCTGCCAGCGCTCCCGGCACCCCAGGGTGAGCCCGGTGA | |
| | | CAGAGCGCCATGGCCTACGGATGGTGGGGCCGCCGGCGCCGCT | |
| | | GGAGAAGATGGAGGACGCGGCGCAGACCGTGGAGAACCAGGAG | |
| | | ACGTAGAAGACGACGCGCTCCTCGCCGCTTTCGACCTCGTCGAAG | |
| | | AGTAA | |
| AAG16249.1 | AF298585_3 | ATGGCCTACGGATGGTGGGGCCGCCGGCGCCGCTGGAGAAGATG | 100 |
| | | GAGGACGCGGCGCAGACCGTGGAGAACCAGGAGACGTAGAAGAC | |
| | | GACGCGCTCCTCGCCGCTTTCGACCTCGTCGAAGAGTAAGGAGG | |
| | | CGCAGGGGGCGGTGGCGCAGACGGTATAGAAAATGGAGGAGACG | |
| | | CAGGGGCAGACGGACGCACAGAAAAAAGATAATCATAAAACAGTG | |
| | | GCAGCCGAACTTTATAAGACGCTGCTACATAATAGGCTACCTGCCT | |
| | | CTCATATTCTGTGGCGAGAACACCACCGCCAATAACTTTGCCACCC | |
| | | ACTCGGACGACATGATAGCCAAAGGACCGTGGGGGGGGGGCATG | |
| | | ACTACCACTAAGTTCACTTTGAGAATCCTGTACGACGAGTTTACCA | |
| | | GGTTTATGAACTTCTGGACTGTCAGTAACGAAGACCTAGACCTGTG | |
| | | TAGATACGTGAGCTGCAAACTGATATTCTTTAAGCACCCCACGGTA | |
| | | GACTTTATAGTCAGGATAAACACAGAGCCTCCGTTCCTAGACACTA | |
| | | ACCTGACCGCGGCACAGATTCACCCGGGCATCATGATGCTAAGCA | |
| | | AAAAACACATACTCATACCCTCTCTAAAGACCAGGCCTAGCAGAAA | |
| | | ACACAGGGTGGTCGTCAGGGTGGGCCCACCTAGACTGTTTCAAGA | |
| | | CAAGTGGTACCCCCAGTCAGACCTGTGTGACACAGTTCTGCTTTC | |
| | | CGTGTTTGCAACGGCCTGTGACTTGCAATATCCGTTCGGCTCACC | |
| | | ACTAACTGACAACCCTTGCGTCAACTTCCAGATTCTGGGGCACCA | |
| | | GTACAAAAACCACCTTAGTATTAGCTCCACAAACGATACCACTAAC | |
| | | AAACAACACTATGACAACACTTTATTTAACAAAATAGTATTATATAA | |
| | | CACTTTTCAAACAATAGCTCAGCTCAAAGAAACAGGACAACTCACA | |
| | | AACTTATGGAACGAAGTACAAAACACAACAGCACTGTCACCAAAAG | |
| | | GCACAAATGCAACTATAAGCAAAGACACCTGGTACAAAGGAAACA | |
| | | CATACAAAGACAAGATTAAAGAGTTAGCAGAAAAAACTCGAAGTAG | |
| | | ATTTGCAGCTGCAACAAAAGCAGCCCTGCCAAACTACCCTACAATC | |
| | | ATGTCCACAGACCTGTATGAGTACCACTCAGGCATATACTCCAGCA | |
| | | TATTCCTAGCAGCAGGCAGGAGCTACTTTGAGACCCCGGGGGCCT | |
| | | ACACAGACGTCATATACAACCCTTTTACAGACAAAGGCACAGGAAA | |
| | | CATGGTCTGGATAGACTACCTCACAAAACCAGACTCCATATACACA | |
| | | AAGAACAAAAGCAAATGCGAGATATTTGACGTACCCCTGTGGGCC | |
| | | ACCTTCACAGGATACTCAGAATTCTGTTCAAAAGTTACAGGAGACA | |
| | | CCGCCATTCACCTAACTGCCAGAGTAGTAGTCAGATGCCCCTACA | |
| | | CCGAGCCCATGCTAATAGACCACTCAGACCCCAACAGGGGCTTTG | |
| | | TACCATACTCCTTTAACTTTGGAGAGGGCAAGATGCCCGGAGGCT | |
| | | CCTCAAAAGTACCCATAAGAATGAGAGCCAAGTGGTACGTGAACA | |
| | | TGTTTCACCAGCAAGAATTCATGGAGGCCATAGTTGAGAGCGGAC | |
| | | CGCTTGCTTACAAGGGCGACATAAAATCAGCGGTACTCACCATGA | |
| | | AATACAGATTCCACTGGAAATGGGGCGGAAACCCTATATCCAAACA | |
| | | GGTCGTCCGGAATCCCTGCTCCACCTCCAGCACCTCCGCGGGCC | |
| | | ATCGAGGACCTCGCAGCATACAAGTCGTTGACCCGAAGCACGTTA | |
| | | CCCCGGAAGTCACCTGGCACTCGTGGGACATCAAGCGAGGTCTCT | |
| | | TTGGCAAAGCAGGTATTAAGAGAATGCAACAAGAATCAGATGCTCT | |
| | | TTACATTCCTACAGGACCACTCAAGAGGCCACGGAGGGACACCAA | |
| | | CGCCCAAGACCCAGAAGAGCAAAACGAAAGCTCAGGTTTCAGAGT | |
| | | CCAGCAGCGACTCCCCTGGGTCCACTCCAGCCAAGAAACGCAAA | |
| | | GCTCCCAAGAGGAGATGCAAGCGGAGGGGACGGTACAAGAACAA | |
| | | CTCCTCCTCCAGCTCCGAGAGCAGCGAGTACTCCGGTTCCAGCTC | |
| | | CAACAGCTCGCCAGCCAAGTCCTCAAAGTGCAAGCAGGGCAAGG | |
| | | CCTACACCCCCTATTATCTTCCCAAGCGTAA | |
| AAG16250.1 | AF298585_4 | ATGTTTGAGCCCCAGGGTCCCAAACCCATACAGGGCTACAACGAT | 101 |
| | | TGGTTAGAAGAGTACACCTGCTGTAAATTCTGGGACAGGCCTCCC | |
| | | AGAAAGCTACACACAGATACACCCTTTTACCCCTGGGCACCAAAAC | |
| | | CCCCAGACCAAGTGAGAGTCTCCTTTAAACTTAACTTCCAATAA | |
| AAL37158.1 | AF315076_2 | ATGTTTCTTGGCAGGGCCTGGAGAAAGAAAAGGCAAGTGCCACTG | 102 |
| | | CCGACACTGCCAGTGGTGCCGCTTCCACAACCTTCACCTATGAGC | |
| | | AGCCAGTGGAGACCCCCGGTTCACAATGTCCAGGGGCTGGAGCG | |
| | | CAATTGGTGGGAGTGCTTCTTCCGTTCTCATGCTTGTTTTTGTGGC | |
| | | TGTGGTGATGCTATTACTCATATTAATCATCTGGCGACTCGTTTTG | |
| | | GACGTCCTCCTACTACCTCAACTCCCCGAGGACCGCAGGCACCTC | |
| | | CAGTGACTCCGTACCCGGCCCTGCCGGCCCCAGAGCCTAGCCCT | |
| | | GAGCCATGGCGTGGCGCCGGTGGCGATGGCGGCCGTGGTGGAG | |
| | | ACGCCGGAGGCGCCGCCGGTGGAGAAGGAGACGGAGGAGACCC | |
| | | AGACGACGCCGCCCTTATCGACGCCGTCGACCTCGCAGAGTAA | |
| AAL37157.1 | AF315076_1 | ATGGCGTGGCGCCGGTGGCGATGGCGGCCGTGGTGGAGACGCC | 103 |
| | | GGAGGCGCCGCCGGTGGAGAAGGAGACGGAGGAGACCCAGACG | |
| | | ACGCCGCCCTTATCGACGCCGTCGACCTCGCAGAGTAAGGAGGC | |
| | | GCAGGGGGCGGTGGAGGCGCGCGTACAGACGTTGGGGGCGACG | |
| | | CAGACGCAGACGCAGGCACAAAAAGAAACTTGTACTGACTCAGTG | |
| | | GCAACCAGCAGTAGTTAAGAGGTGCCTAATAGTGGGCTTTGACCC | |
| | | CCTTATAATATGTGGCATTAACAGAACAATATTTAACTACACTACAC | |
| | | ACTCTGAAGACTTTACTTTTAACAACGACAGCTTTGGAGGGGGGCT | |
| | | CTGTACCGCTCAGTACACACTAAGAATCCTTTTCCAAGAAAAGCTG | |
| | | GCCCAGCACAACTTCTGGTCAGCTAGCAACGAAGACCTAGACCTT | |
| | | GCCAGGTACCTAGGAGCCACAATAGTACTTTACAGACACCCTACA | |
| | | GTAGACTTCTTAGTTAGAATTCGCACCAGTCCTCCCTTTGAGGACA | |
| | | CAGACATGACAGCCATGACACTACATCCAGGCATGATGATGCTAG | |
| | | CTAAAAAGACAATTAAAATTCCCAGTCTTAAAACAAGACCGTCCAG | |
| | | AAAACACGTAGTAAGGATTAGAGTAGGGGCCCCTAAACTATTTGAA | |
| | | GACAAGTGGTACCCCCAGAACGAGCTATGTGATGTAACTCTGCTA | |
| | | ACCATACAGGCAACCACAGCTGATTTCCAATATCCGTTCGGCTCAC | |
| | | CACTAACGAACTCCCCCTGTTGCAACTTCCAGGTTCTTAACAGTAA | |
| | | CTATGACAATGCACATTCCATACTTAACTTGTCAAACGAACCAACA | |
| | | AACAAATGGCACACCTATAGAAATAACTGCTATAAATTTCTACTAGA | |
| | | ACAGTACAGCTACTACAACACTAAACAAGTAGTAGCACAACTTAAA | |
| | | TATAAATGGAACCCTAATCAAAACCCTACTATGCCAAATACAAGCA | |
| | | ATGCATCACTTTCTAAAAAACCTGATGACCTTACTAAAACCAAAACA | |
| | | ACAAACGAGTATCCACATTGGGACACCCTATATGGTGGTTTAGCAT | |
| | | ATGGACACAGCACTGTAACACCTGGCACTACCTCATCACCAACAG | |
| | | ACCTAAAAACACAAATGCTTACAGGCAACGAATTTTATACAACAGC | |
| | | AGGCAAAAAGTTAATAGATACATTTCACCCAATTCCTTACTATGAAA | |
| | | ACGGATCTTCTAAAGCCAACACCAACATATTTGACTACTACACAGG | |
| | | CATGTACAGTAGTATTTTCCTGTCTTCAGGCAGATCAAACCCAGAA | |
| | | GTAAAGGGCAGCTACACAGACATCTCTTACAACCCTCTGACAGAC | |
| | | AAGGGAGTAGGTAACATGATTTGGATAGACTGGCTCACTAAAGGA | |
| | | GACACAGTATACGACCCCAAAAAAAGCAAGTGCCTACTCTCAGACT | |
| | | TTCCATTGTGGTCACTTTGTTATGGATACCCAGACTACTGCAGAAA | |
| | | ACAAACCGGAGACTCAGGTATTTACTATGACTACAGAGTACTTATA | |
| | | AGATGTCCATACACATACCCTCAATTAATAAAACACAACGACAAAT | |
| | | ACTTTGGCTTCGTAGTGTACAGCGAAAACTTTGGACTGGGGCGAC | |
| | | TACCAGGAGGCAACCCTAACCCCCCAACTAGAATGAGACTGCACT | |
| | | GGTACCCTAATATGTTCCACCAAACAGAAGTACTAGAGTGCATAGC | |
| | | TCAAAGCGGACCGTTTGCTTATCATGGAGACGAGAGAAAAGCTGT | |
| | | TCTGACTGCCAAATACAAGTTCAGATGGAAGTGGGGAGGCAATCC | |
| | | TGTGTTTCAACAGGTTCTCCGAGACCCCTGCACCGGAGGTGCCGT | |
| | | GGCGCCCCACACCAGTCGACACCCTCGTGCAATACAAGTCCATGA | |
| | | CCCGAAGTATCAGGCCCCGGAGTACCTCTTCCACAAATGGGACTT | |
| | | CAGAAGGGGACTGTTTAGCACTAAAGGTATTAAGAGAGTGTCAGA | |
| | | ACAACCAGTACATGATGAGTATTTTACAGGGAGCAGCAAGAGACC | |
| | | CAAGAAAGACACCAACCCAAGCCCCCAAGGAGAAGAGCAAAAAGA | |
| | | AGGCTCGCGTTTCAGAGTCCCAGAGCTCAGACCCTGGCTCCCCTC | |
| | | CAGCCAGGAAACGCAGAGCCAAAGCGAGCAAGAAGAAACAGCCC | |
| | | CGAAAACGGTCCAAGAGCAGCTACAAGAACAACTCCAGCAGCAGC | |
| | | AGCTCATGGGAATCCAGCTCAGAAACGTCTGTCTCCAGCTCGCAA | |
| | | GAGTCCAAGCGGGGCACAGTCTCCACCCCGTTTTCCAATGCCATG | |
| | | CATAA | |
| AAL37159.1 | AF315076_3 | ATGACCCGAAGTATCAGGCCCCGGAGTACCTCTTCCACAAATGGG | 104 |
| | | ACTTCAGAAGGGGACTGTTTAGCACTAAAGGTATTAAGAGAGTGTC | |
| | | AGAACAACCAGTACATGATGAGTATTTTACAGGGAGCAGCAAGAG | |
| | | ACCCAAGAAAGACACCAACCCAAGCCCCCAAGGAGAAGAGCAAAA | |
| | | AGAAGGCTCGCGTTTCAGAGTCCCAGAGCTCAGACCCTGGCTCCC | |
| | | CTCCAGCCAGGAAACGCAGAGCCAAAGCGAGCAAGAAGAAACAG | |
| | | CCCCGAAAACGGTCCAAGAGCAGCTACAAGAACAACTCCAGCAGC | |
| | | AGCAGCTCATGGGAATCCAGCTCAGAAACGTCTGTCTCCAGCTCG | |
| | | CAAGAGTCCAAGCGGGGCACAGTCTCCACCCCGTTTTCCAATGCC | |
| | | ATGCATAAACAAAGTTTTTATTTTCCCTGA | |
| AAL37160.1 | AF315077_1 | ATGTTTCTCGGTAAACTTTACAGAAAGAAAAGGAAACTGCTACTGC | 105 |
| | | AAGCTGTGCGAGCTCCACAGGCGCCATCTTCCATGAGCTCCTCCT | |
| | | GGCGAGTGCCCCGCGGCGATGTCTCCGCCCGCGAGCTATGTTGG | |
| | | TACCGCTCAGTTCGAGAGAGCCACGATGCTTTTTGTGGCTGTCGT | |
| | | GATCCTGTTTTTCATCTTTCTCGTCTGGCTGCACGTTCTAACCATCA | |
| | | GGGACCTCCGACGCCCCCCACGGACGAGCGCCCGTCGGCGTCTA | |
| | | CCCCAGTGAGGCGCCTGCTGCCGCTGCCCTCCTACCCCGGCGAG | |
| | | GGTCCCCAGGCTAGATGGCCTGGTGGAGATGGAGAAGGCGCTGG | |
| | | TGACGCCCGCGGAGGCGCTGGAGATGGCGGCGCCCGCGCAGGC | |
| | | GAAGAAGAGTACCGGCCCGAAGACCTCGACGAGCTGTTCGGCGC | |
| | | TACCGAACAAGAACAGTAA | |
| AAL37161.1 | AF315077_2 | ATGCCAGTTATCTGGGCGGGCATGGGCACGGGGGGCCAAAACTA | 106 |
| | | CGCCGTCCGCTCAGATGACTTTGTAGTAGACAAGGGCTTCGGGGG | |
| | | CTCCTTCGCTACAGAGACTTTCTCCTTGAGAGTACTGTATGACCAG | |
| | | CACCAGAGGGGCTTTAACCGGTGGTCCCACACCAACGAGGACCTA | |
| | | GACCTTGCCCGTTACAGGGGATGCAAATGGACCTTTTACAGACAC | |
| | | CCAGACACTGACTTTATAGTGTACTTCACTAACAATCCCCCCATGA | |
| | | AAACTAACCAGTACACTGCCCCTCTCACCACTCCTGGAATGCTCAT | |
| | | GAGAAGCAAATATAAGATACTAATACCTAGTTTTAAAACAAAACCCA | |
| | | AGGGAAAAAAGACAATAAGCTTCAGAGCCAGACCCCCAAAACTAT | |
| | | TCCAAGACAAGTGGTACACTCAACAAGACCTCTGCCCTGTGCCCC | |
| | | TCATCCAACTGAACTTAACCGCAGCTGATTTCACACATCCGTTCGG | |
| | | CTTACCACTAACTGACTCTCCTTGCGTAAGGTTCCAAGTCCTCGGA | |
| | | GACTTGTACAATAACTGTCTCAATATAGACCTTCCGCAATTTGATGA | |
| | | CAAGGGTACAATTTCAGACGCATCCTCTTACAGTAGAGATAATAAG | |
| | | CAGCAGTTAGAAGAATTATATAAAACTCTATTTGTTAAAAAGGGCTG | |
| | | CGGACACTACTGGCAAACATTCATGACCAATAGCATGGTAAAAGCA | |
| | | CACATAGATGCTGCACAGGCACAAAACCATCAACAAGACACCTCA | |
| | | GGCCCTCAAAGTGCAAAAGATCCATTTCCAACAAAACCTGACAGAA | |
| | | ACCAATTTGAACAATGGAAAAACAAATTCACAGACCCCAGAGACAG | |
| | | CAACTTTCTCTTTGCCACTTATCACCCAGAAAACATTACACAGACTA | |
| | | TCAAAACAATGAGAGACAATAACTTTGCTCTAGAAACTGGAAAGAA | |
| | | TGACCTTTATGGTGATTATCAGGCCCAGTATACTAGAAACACTCAC | |
| | | CTTCTAGACTACTACCTGGGCTTCTACAGCCCCATATTCTTGTCCA | |
| | | GTGGCAGATCCAATACTGAATTCTTTACTGCCTACAGAGACATAAT | |
| | | ATACAATCCACTACTAGACAAAGGCACAGGTAATATGATTTGGTTC | |
| | | CAATACCACACAAAGACTGACAACATATTTAAAAAACCAGAGTGCC | |
| | | ACTGGGAAATACTAGACATGCCCCTGTGGGCCCTCTGCAACGGCT | |
| | | ACAAAGAGTACCTAGAGAGCCAAATAAAATATGGTGATATCTTAGT | |
| | | AGAAGGCAAAGTCCTCATAAGATGCCCATACACCAAACCTCCCCTA | |
| | | GCAGACCCCAACAACAGTCTAGCAGGATATGTAGTCTACAACACA | |
| | | AACTTTGGACAAGGCAAGTGGATCGACGGCAAGGGCTACATACCC | |
| | | CTAAGACACAGGAGCAAGTGGTATGTCATGCTCATGTACCAGACG | |
| | | GACGTACTCCATGACCTAGTGACTTGTGGACCCTGGCAATACAGA | |
| | | GACGATAATAAGAACTCTCAACTGATAGCCAAGTATAGATTTACTTT | |
| | | CTACTGGGGAGGTAACATGGTACATTCTCAGGTCATCAGGAACCC | |
| | | GTGCAAAGACACCCAAGTATCCGGCCCCCGTCGACAGCCTAGAGA | |
| | | GATACAAGTCGTTGACCCGCAACTCATCACCCCGCCGTGGGTCCT | |
| | | CCACTCGTTCGACCAGAGACGAGGAATGTTTACTGAGACAGCTAT | |
| | | CAGACGTCTGCTCAGACAACCACTACCTGGCGAGTATGCTCCTCC | |
| | | AGCACTCAGGGTCCCGCTCCTCTTTCCCTCCTCAGAGTTCCAACG | |
| | | AGAGGGAGAAGGTGCAGAAAGCGACTTATCTTCCCCGGCCAAAAG | |
| | | ACCACGACTCTGGCAAGAAGAGGACAGCGAGACGCAGACGCAGT | |
| | | CCTCGGAGGGGCCGGCGGAGACGACGAGGGAGCTCCTCGAGCG | |
| | | AAAGCTCAGAGAGCAGCGAGTCCTCAACCTCCAACTCCAGCAATT | |
| | | CGCCGTACAACTCGCCAAGACCCAAGCGAACCTCCACATAAACCC | |
| | | CTTATTATACTCCCAGCAGTAA | |
| AAL37162.1 | AF315077_3 | ATGCTCCTCCAGCACTCAGGGTCCCGCTCCTCTTTCCCTCCTCAG | 107 |
| | | AGTTCCAACGAGAGGGAGAAGGTGCAGAAAGCGACTTATCTTCCC | |
| | | CGGCCAAAAGACCACGACTCTGGCAAGAAGAGGACAGCGAGACG | |
| | | CAGACGCAGTCCTCGGAGGGGCCGGCGGAGACGACGAGGGAGC | |
| | | TCCTCGAGCGAAAGCTCAGAGAGCAGCGAGTCCTCAACCTCCAAC | |
| | | TCCAGCAATTCGCCGTACAACTCGCCAAGACCCAAGCGAACCTCC | |
| | | ACATAA | |
| CAF05717.1 | AJ620212.1 | ATGTACTTTTCCAGAAAAAGAAGACCCAAGAAGGAGAGGCCGCTG | 108 |
| | | CCACTGCGATACGTGTGTGGCCTACCGCCTAGCAGGCCTGATCCG | |
| | | ATGAGCTGGCGTCCACCTGCCCACGATGTCCCAGGACAAGAGGG | |
| | | CCTGTGGTACCGATCAGTTTTTACTTCTCATGGCGCTTTTTGTGGT | |
| | | TGCGGTGATTTTGTGGGTCATCTTCAGAGACTTAGCGAACGCCTG | |
| | | GGTAGACCCCAACCACCAAGACCACCGGGCGAGCCGCCGGGCCC | |
| | | TGCTGTGAGAGTTCTGCCTGCCCTGCCGCCTCCAGTACCTGAACC | |
| | | AAGAAGACACGTCCAGAGAGAGAACCCGGGATGTGGTGGTGGAG | |
| | | ACGCCGCAGATGGAGGGCCCCATGGAGAAGGAGGCGATGGAGAC | |
| | | GACGCAGACCTCGGACCAGAAGATTTAGACGAGCTGCTCGACGTC | |
| | | CTAGACGCCCCAGAGTAA | |
| CAF05718.1 | AJ620212.1 | ATGTGGTGGTGGAGACGCCGCAGATGGAGGGCCCCATGGAGAAG | 109 |
| | | GAGGCGATGGAGACGACGCAGACCTCGGACCAGAAGATTTAGAC | |
| | | GAGCTGCTCGACGTCCTAGACGCCCCAGAGTAAGGAGACCTCGG | |
| | | CGCCGCAGGGGGTGGGCTCGTAGATATAGACTTAGAAGGAGGCG | |
| | | AAGGAGGAGAAGAAGGAGAAAGCTTATACTAACACAATGGCAGCC | |
| | | AGCAAAAATAAGAAAATGTCTAGTAATAGGTTATCTTGCTCTAGTAC | |
| | | TATGTGGGAACGGGACATTCAGTAAAAACTATGCCTCCCACTCAGA | |
| | | TGACTATGTACAGAAAGGACCCTTTGGAGGGGGACTGAGCAGCAT | |
| | | GAGATTTAACATGAGAATACTATATGATCAATTTAAAAGACACCTTA | |
| | | ACTTCTGGACACACACAAACCAGGACCTAGACCTAGTTAGATACAG | |
| | | AGGCTGCACCATGACATTTTATAGACACCCAGAGGTGGACTTCATA | |
| | | GTAAAATTCAACAGAAAACCTCCATTCCTAGACACAATAGTATCAG | |
| | | GTCCAGCCATGCACCCAGGCATGCTAATGACAACAAAACACAAAA | |
| | | TACTAGTAAAAAGCTTTAAAACAAAACCCAAAGGAAAAGGCACAGT | |
| | | AAAGGTGCGCATTCGCCCCCCCACACTCTTTGACGACCGTTGGTA | |
| | | CTTTCAACATGACATCTGCAAAACCACACTGTTCACCATTAGCGCA | |
| | | ACACCATGTGACCTGCGGTTTCCGTTCTGCTCACCACAAACTGACA | |
| | | ACCCTTGCGTCAACTTCCTAGTTCTTGCAGGAGTGTATAACGGCAA | |
| | | ACTTAGCATAGAACCCACAAACGTAGAATCACAATATAATTCACTA | |
| | | CTTTCAGCTATAGAGACACACACCCAAGGCACTCTATTTAATACAT | |
| | | TTAAAACACCAGAAATGATAAAGTGCCCCCCAGCAGTAAAAGCCC | |
| | | CAGAAACTGGAGACATATCCACAAACTGCTACAAAAAACTAGACAT | |
| | | CGCCTGGGGAGACACTATATGGAACCAAAGCACCATAGGCAACTT | |
| | | TAAAAAGAACACAGAGAACTTGTGGAATGCAAGACACAATCAAACA | |
| | | ATGACTGGTAGCAAATACCTAAACTACAGAACAGGAATATACAGTG | |
| | | CCATATTCCTTTCAGCAGGCAGACTGTCACCAGACTTTCCAGGACT | |
| | | ATACAATGACATAGTATACAATCCCACCACAGACGAAGGCATAGGA | |
| | | AACATTGTGTGGATAGACTGGTGTACAAAAGCAGACTGCAACTTCA | |
| | | ATGAGACACAGTCCAAAGGAGTAATAAAAGACATTCCACTGTGGG | |
| | | CAGCACTGTTTGGCTATGTAGACTTTCTAAAAAAGACATTTAAAGA | |
| | | CGACCAGCTAGACAAAACTGCCAGACTCACTCTCATAAGCCCCTAT | |
| | | ACAAAGCCTCAACTAATAGGACCTACACAACCCAACAAAGGGTTTG | |
| | | TTCCGTACGACTACAACTTTGGCAGAGCACACATGCCCTCCGGAG | |
| | | AATCCTACATACCTATGTACTACAGATTTAGATGGTACATCTGCCTA | |
| | | TTTCACCAACAAAAGTTTATAGACGACATTGTAAGCAGCGGGCCCT | |
| | | TCGCATACCACGGCTCACAGCCCTCAGCAACTCTCACCACTAAATA | |
| | | CAAATTCCACTTTCTCTTTGGGGGCAACCCCGTTCCCCAACAGACT | |
| | | GTCAGAGACCCTTGTAACCAACCAGTCTTTGACATTCCCGGAGCC | |
| | | GGTGGACTCCCTCGTCCGATACAAGTCGTTGACCCGAAATACGTC | |
| | | AACGAAGGCTACACGTTCCACGCCTGGGACTTCCGTAGAGGGCTC | |
| | | TTTGGCCAAGCAGCTATTAAAAGAGTGTCGGGAGAACAAACAAAT | |
| | | GCTTCACTTTATTCATCAGGTCCAAAACGGCCAAGAACAGAAATTC | |
| | | CTCCAGAAAATGCAGAAGAAGGCTCATATTCCAGGGAACAAAAAC | |
| | | TCCAGCCCTGGCTCGACTCGAGCGACCAGGAAGAGAGCGAGACA | |
| | | GAAGCCCCAGAAGAAGAAGCGACCTCGCCGCCGTCGCTACAGCT | |
| | | CCAGCTCAAGCAGCAGATCAGGGAGCAGCGACAACTCAGATGTG | |
| | | GAATCCAACACCTCTTCCAGCAACTAGTGAAAACCCAGCAAAACTT | |
| | | GCATATCGACCCATGCCTACAATAG | |
| CAF05719.1 | AJ620213.1 | ATGTACTTTTCCAGAAAAAGAAGACCCAAGAAGGAGAGGCCGCTG | 110 |
| | | CCACTGCGATACGTGTGTGGCCTACCGCCTAGCAGGCCTGATCCG | |
| | | ATGAGCTGGCGTCCACCTGCCCACGATGTCCCAGGACAAGAGGG | |
| | | CCTGTGGTACCGATCAGTTTTTACTTCTCATGGCGCTTTTTGTGGT | |
| | | TGCGGTGATTTTGTGGGTCATCTTCAGAGACTTAGCGAACGCCTG | |
| | | GGTAGACCCCAACCACCAAGACCACCGGGCGGACCGCCGGGCCC | |
| | | TGCTGTGAGAGCTCTGCCTGCCCTGCCGCCTCCGGAACCTGAACC | |
| | | AAGAAGACACGTCCAGAGAGAGAACCCGGGATGTGGTGGTGGAG | |
| | | ACGCCGCAGATGGAGGGCCCCATGGAGAAGGAGGCGATGGAGAC | |
| | | GACGCAGACCTCGGACCAGAAGATTTAGACGAGCTGCTCGACGTC | |
| | | CTAGACGCCCCAGAGTAA | |
| CAF05720.1 | AJ620213.1 | ATGTGGTGGTGGAGACGCCGCAGATGGAGGGCCCCATGGAGAAG | 111 |
| | | GAGGCGATGGAGACGACGCAGACCTCGGACCAGAAGATTTAGAC | |
| | | GAGCTGCTCGACGTCCTAGACGCCCCAGAGTAAGGAGACCTCGG | |
| | | CGCCGCAGGGGGTGGGCTCGTAGATATAGACTTAGAAGGAGGCG | |
| | | GAGGAGGAGAAGAAGGAGAAAGCTTATACTAACACAATGGCAGTC | |
| | | AGCAAAAATAAGAAAATGTCTAGTAATAGGTTATCTTGCTCTAGTAC | |
| | | TATGTGGAAACGGGACATTCAGTAAAAACTATGCCTCGCACTCAGA | |
| | | TGACTATGTACAGAAAGGACCCTTTGGAGGGGGACTAAGCAGCAT | |
| | | GAGATTTAACATGAGAATACTATATGATCAATTTAAAAGACACCTTA | |
| | | ACTTCTGGACACACACAAACCAGGACCTAGACCTAGTTAGATACAG | |
| | | AGGCTGCACCATGACATTTTATAGACACCCAGAGGTGGACTTCATA | |
| | | GTAAAATTCAACAGAAAACCTCCATTCCTAGACACAATAGTATCAG | |
| | | GTCCAGCCATGCACCCAGGCATGCTAATGACAACAAAACACAAAA | |
| | | TACTAGTAAAAAGCTTTAAAACAAAACCCAAAGGAAAAGGCACAGT | |
| | | AAAGGTGCGCATTCGCCCCCCCACACTCTTTGACGACCGTTGGTA | |
| | | CTTTCAACATGACATCTGCAAAACCACACTGTTCACCATTAGCGCA | |
| | | ACACCATGTGACCTGCGGTTTCCGTTCTGCTCACCACAAACTGACA | |
| | | ACCCTTGCGTCAACTTCCTAGTTCTTGCAGGAGTGTATAACGGCAA | |
| | | ACTTAGCATAGAAGCCACAAAGTTAGAATCACAATATAATTCACTA | |
| | | GTTTCATCTATAGAAATACCCACCCAAGGCACTCTATTTAATACATT | |
| | | TAAAACACCAGAAATGATAAAGTGCCCCCCAGCAGTAAAAGCCTTA | |
| | | GAACATTCAGACGTAAACAGAAGCTGCTACAAAAAACTAGACAGC | |
| | | GCCTGGGGAGACACTATATGGAACCAGAACACCATACAGAACTTT | |
| | | AAAGAAAACACAGACAAGTTGTGGGAAGCAAGAGGCAACCAAACA | |
| | | ATGACTGGTAGCAAATACCTAAACTACAGAACAGGAATATACAGTG | |
| | | CCATATTCCTTTCAGCAGGCAGACTGTCACCAGACTTTGGGGGAC | |
| | | TATACAATGACATAGTATACAATCCCACCACAGACGAAGGCATAGG | |
| | | AAACATTGTGTGGATAGACTGGTGTACAAAAGCAGACTGCAACTTC | |
| | | AATGAGACACAGTCCAAAGGAGTAATAAAAGACATTCCACTGTGG | |
| | | GCAGCACTGTTTGGCTATGTAGACTTTCTAAAAAAGACATTTAAAG | |
| | | ACGAACAGCTAGACAAAATTGCCAGACTCACTCTCATAAGCCCCTA | |
| | | TACAAAGCCTCAACTAATAGGACCTACACAACCCAACAAAGGGTTT | |
| | | GTTCCGTACGACTACAACTTTGGCAGAGCACACATGCCCTCCGGA | |
| | | GAATCCTACATACCTATGTACTACAGATTTAGATGGTACATCTGCC | |
| | | TATTTCACCAACAAAAGTTTATAGACGACATTGTAAGCAGCGGGCC | |
| | | CTTCGCATACCACGGCTCACAGCCCTCAGCAACTCTCACCACTAA | |
| | | ATACAAATTCCACTTTCTCTTTGGGGGCAACCCCGTTCCCCAACAG | |
| | | ACTGTCAGAGACTCTTGTAACCAACCAGTCTTTGACATTCCCGGAG | |
| | | CCGGTGGACTCCCTCGTCCGATACAAGTCGTTGACCCGAAATACG | |
| | | TCAACGAAGGCTACACGTTCCACGCCTGGGACTTCCGTAGAGGGC | |
| | | TCTTTGGCCAAGCAGCTATTAAAAGAGTGTCGGGAGAACAAACAAA | |
| | | TGCTTCACTTTATTCATCAGGTCCAAAACGGCCAAGAACAGAAATT | |
| | | CCTCCACAAAATGCAGAAGAAGGCTCATATTCCAGGGAACAAAAA | |
| | | CTCCAGCCCTGGCTCGACTCGAGCGACCAGGAAGAGAGCGAGAC | |
| | | AGAAGCCCCAGAAGAAGAAGCGACCTCGCCACCGTCGCTACAGC | |
| | | TCCAGCTCAAGCAGCAGATCAGGGAGCAGCGACAACTCAGATGTG | |
| | | GAATCCAACACCTCTTCCAGCAACTAGTGAAAACCCAGCAAAACTT | |
| | | GCATATCAATCCATGCCTACAGTAG | |
| CAF05775.1 | AJ620214.1 | ATGTACTTTTCCAGAAAAAGAAGACCCAAGAAGGAGAGGCCGCTG | 112 |
| | | CCACTGCGATACGTGTGTGGCCTACCGCCTAGCAGGCCTGATCCG | |
| | | ATGAGCTGGCGTCCACCTGCCCACGATGTCCCAGGACAAGAGGG | |
| | | CCTGTGGTACCGATCAGTTTTTACTTCTCATGGCGCTTTTTGTGGT | |
| | | TGCGGTGATTTTGTGGGTCATCTTCAGAGACTTAGCGAACGCCTG | |
| | | GGTAGACCCCAACCACCAAGACCACCGGGCGGACCGCCGGGCCC | |
| | | TGCTGTGAGAGCTCTGCCTGCCCTGCCGCCTCCGGAGCCTGAAC | |
| | | CAAGAAGACACGTCCAGAGAGAGAACCCGGGATGTGGTGGTGGA | |
| | | GACGCCGCAGATGGAGGGCCCCATGGAGAAGGAGGCGATGGAG | |
| | | ACGACGCAGACCTCGGACCAGAAGATTTAGACGAGCTGCTCGACG | |
| | | TCCTAGACGCCCCAGAGTAA | |
| CAF05776.1 | AJ620214.1 | ATGTGGTGGTGGAGACGCCGCAGATGGAGGGCCCCATGGAGAAG | 113 |
| | | GAGGCGATGGAGACGACGCAGACCTCGGACCAGAAGATTTAGAC | |
| | | GAGCTGCTCGACGTCCTAGACGCCCCAGAGTAAGGAGACCTCGG | |
| | | CGCCGCAGGGGGTGGGCTCGTAGATATAGACTTAGAAGGAGGCG | |
| | | GAGGAGGAGAAGAAGGAGAAAGCTTATACTAACACAATGGCAGCC | |
| | | AGCAAAAATAAGAAAATGTCTAGTAATAGGTTATCTTGCTCTAGTAC | |
| | | TATGTGGAAACGGGACATTCAGTAAAAACTATGCCTCGCACTCAGA | |
| | | TGACTATGTACAGAAAGGACCCTTTGGAGGGGGACTAAGCAGCAT | |
| | | GAGATTTAACATGAGAATACTATATGATCAATTTAAAAGACACCTTA | |
| | | ACTTCTGGACACACACAAACCAGGACCTAGACCTAGTTAGATACAG | |
| | | AGGCTGCACCATGACATTTTATAGACACCCAGAGGTGGACTTCATA | |
| | | GTAAAATTCAACAGAAAACCTCCATTCCTAGACACAATAGTATCAG | |
| | | GTCCAGCCATGCACCCAGGCATGCTAATGACAACAAAACACAAAA | |
| | | TACTAGTAAAAAGCTTTAAAACAAAACCCAAAGGAAAAGGCACAGT | |
| | | AAAGGTACGCATTCGCCCCCCCCACACTCTTTGA | |
| CAF05777.1 | AJ620214.1 | ATGATAAAGTGCCCCCCAGCAGTAAAAGCCTTAGAACATTCAGAC | 114 |
| | | GTAAACAGAAACTGCTACAAAAAACTAGACAGCGCCTGGGGAGAC | |
| | | ACTATATGGAACCAGAACACCATACAGAACTTTAAAGAAAACACAG | |
| | | ACAAGTTGTGGGAAGCAAGAGGCAACCAAACAATGACTGGTAGCA | |
| | | AATACCTAAACTACAGAACAGGAATATACAGTGCCATATTCCTTTCA | |
| | | GCAGGCAGACTGTCACCAGACTTTGGGGGACTATACAATGACATA | |
| | | GTATACAATCCCACCACAGGCGAAGGCATAGAAAACATTGTGTGG | |
| | | ATAGACTGGTGTACAAAAGCAGACTGCAACTTCAATGAGACACAGT | |
| | | CCAAAGGAGTAATAAAAGACATTCCACTGTGGGCAGCACTGTTTG | |
| | | GCTATGTAGACTTTCTAAAAAAGACATTTAAAGACGAACAGCTAGA | |
| | | CAAAATTGCCAGACTCACTCTCATAAGCCCCTATACAAAGCCTCAA | |
| | | CTAATAGGACCTACACAACCCAACAAAGGGTTTGTTCCGTACGACT | |
| | | ACAACTTTGGCAGAGCACACATGCCCTCCGGAGAATCCTACATAC | |
| | | CTATGTACTACAGATTTAGATGGTACACCTGCCTATTTCACCAACA | |
| | | AAAGTCTATAGACGACATTGTAAGCAGCGGGCCCTTCGCATACCA | |
| | | CGGCTCACAGCCCTCAGCAACTCTCACCACTAAATACAAATTCCAC | |
| | | TTTCTCTTTGGGGGCAACCCCGTTCCCCAACAGACTGTCAGAGAC | |
| | | CCTTGTAACCAACCAATCTTTGACATTCCCGGAGCCGGTGGACTC | |
| | | CCTCGTCCGATACAAGTCGTTGACCCGAAATACGTCAACGAAGGC | |
| | | TACACGTTCCACGCCTGGGACTTCCGTAGAGGGCTCTTTGGCCAA | |
| | | GCAGCTATTAAAAGAGTGTCGGGAGAACAAACAAATGCTTCACTTT | |
| | | ATTCATCAGGTCCAAAACGGCCAAGAACAGAAATTCCTCCACAAAA | |
| | | TGCAGAAGAAGGCTCATATTCCAGGGAACAAAAACTCCAGCCCTG | |
| | | GCTCGACTCGAGCGACCAGGAAGAAAGCGAGACAGAAGCCCCAG | |
| | | AAGAAGAAGCGACCTCGCCACCGTCGCTACAGCTCCAGCTCAAGC | |
| | | AGCAGATCAGGGAGCAGCGACAACTCAGATGTGGAATCCAACACC | |
| | | TCTTCCAGCAACTAGTGAAAACCCAGCAAAACTTGCATATCAACCC | |
| | | ATGCCTACAATAG | |
| CAF05721.1 | AJ620215.1 | ATGTACTTTTCCAGAAAAAGAAGACCCAAGAAGGAGAGGCCGCTG | 115 |
| | | CCACTGCGATACGTGTGTGGCCTACCGCCTAGCAGGCCTGATCCG | |
| | | ATGAGCTGGCGTCCACCTGCCCACGATGTCCCAGGACAAGAGGG | |
| | | CCTGTGGTACCGATCAGTTTTTACTTCTCATGGCGCTTTTTGTGGT | |
| | | TGCGGTGATTTTGTGGGTCATCTTCAGAGACTTAGCGAACGCCTG | |
| | | GGTAGACCCCAACCACCAAGACCACCGGGCGGACCGCCGGGCCC | |
| | | TGCTGTGAGAGCTCTGCCTGCCCTGCCGCCTCCGGAGCCTGAAC | |
| | | CAAGAAGACACGTCCAGAGAGAGAACCCGGGATGTGGTGGTGGA | |
| | | GACGCCGCAGATGGAGGGCCCCATGGAGAAGAAGGCGATGGAGA | |
| | | CGACGCAGACCTCGGGCCAGAAGATTTAGACGAGCTGCTCGACG | |
| | | TCCTAGACGCCCCAGAGTAA | |
| CAF05722.1 | AJ620215.1 | ATGTGGTGGTGGAGACGCCGCAGATGGAGGGCCCCATGGAGAAG | 116 |
| | | AAGGCGATGGAGACGACGCAGACCTCGGGCCAGAAGATTTAGAC | |
| | | GAGCTGCTCGACGTCCTAGACGCCCCAGAGTAAGGAGACCTCGG | |
| | | CGCCGCAGGGGGTGGGCTCGTAGATATAGACTTAGAAGGAGGCG | |
| | | GAGGAGGAGAAGAAGGAGAAAGCTTATACTAACACAATGGCAGCC | |
| | | AGCAAAAATAAGAAAATGTCTAGTAATAGGTTATCTCGCTCTAGTA | |
| | | CTATGTGGAAACGGGACATTCAGTAAAAACTATGCCACGCACTCA | |
| | | GATGACTATGTACAGAAAGGACCCTTTGGAGGGGGACTAAGCAGC | |
| | | ATGAGATTTAACATGAGAATACTATATGATCAATTTAAAAGACACCT | |
| | | TAACTTCTGGACACACACAAACCAGGACCTAGACCTAGTTAGATAC | |
| | | AGAGGCTGCACCATGACATTTTATAGACACCCAGAGGTGGACTTC | |
| | | ATAGTAAAATTCAACAGAAAACCTCCATTCCTAGACACAATAGTATC | |
| | | AGGTCCAGCCATCCACCCAGGCATGCTAATGACAACAAAACACAA | |
| | | AATACTAGTAAAAAGCTTTAAAACAAAACCCAAAGGAAAAGGCACA | |
| | | GTAAAGGTGCGCATTCGCCCCCCCACACTCTTTGACGACCGTTGG | |
| | | TACTTTCAACATGACATCTGCAAAACCACACTGTTCACCATTAGCG | |
| | | CAACACCATGTGACCTGCGGTTTCCGTTCTGCTCACCACAAACTGA | |
| | | CAACCCTTGCGTCAACTTCCTAGTTCTTGCAGGAGTGTATAACGGC | |
| | | AAACTTAGCATAGAAGCCACAAAGTTAGAATCACAATATAATTCACT | |
| | | AGTTTCATCTATAGAAATACCCACCCAAGGCACTCTATTTAATACAT | |
| | | TTAAAACACCAGAAATGATAAAGTGCCCCCCAGCAGTAAAAGCCTT | |
| | | AGAACATTCAGACGTAAACAGAAACTGCTACAAAAAACTAGACAGC | |
| | | GCCTGGGGAGACACTATATGGAACCAGAACACCATACAGAACTTT | |
| | | AAAGAAAACACAGACAAGTTGTGGGAAGCAAGAGGCAACCAAACA | |
| | | ATGACTGGTAGCAAATACCTAAACTACAGAACAGGAATATACAGTG | |
| | | CCATATTCCTTTCAGCAGGCAGACTGTCACCAGACTTTGGGGGAC | |
| | | TATACAATGACATAGTATACAATCCCACCACAGACGAAGGCATAGG | |
| | | AAACATTGTGTGGATAGACTGGTGTACAAAAGCAGACTGCAACTTC | |
| | | AATGAGACACAGTCCAAAGGAGTAATAAAAGACATTCCACTGTGG | |
| | | GCAGCACTGTTTGGCTATGTAGACTTTCTAAAAAAGACATTTAAAG | |
| | | ACGAACAGCTAGACAAAATTGCCAGACTCACTCTCATAAGCCCCTA | |
| | | TACAAAGCCTCAACTAATAGGACCTACACAACCCAACAAAGGGTTT | |
| | | GTTCCGTACGACTACAACTTTGGCAGAGCACACATGCCCTCCGGA | |
| | | GAATCCTACATACCTATGTACTACAGATTTAGATGGTACATCTGCC | |
| | | TATTTCACCAACAAAAGTTTATAGACGACATTGTAAGCAGCGGGCC | |
| | | CTTCGCATACCACGGCTCACAGCCCTCAGCAACTCTCACCACTAA | |
| | | ATACAAATTCCACTTTCTCTTTGGGGGCAACCCCGTTCCCCAACAG | |
| | | ACTGTCAGAGACCCTTGTAACCAACCAGTCTTTGACATTCCCGGAG | |
| | | CCGGTGGACTCCCCCGTCCGATACAAGTCGTTGACCCGAAATACG | |
| | | TCAACGAAGGCTACACGTTCCACGCCTGGGACTTCCGTAGAGGGC | |
| | | TCTTTGGCCAAGCAGCTATTAAAAGAGTGTCGGGAGAACAAACAAA | |
| | | TGCTTCACTTTATTCATCAGGTCCAAAACGGCCAAGAACAGAAATT | |
| | | CCTCCACAAAATGCAGAAGAAGGCTCATATTCCAGGGAACAAAAA | |
| | | CTCCAGCCCTGGCTCGACTCGAGCGACCAGGAAGAGAGCGAGAC | |
| | | AGAAGCCCCAGAAGAAGAAGCGACCTCGCCACCGTCGCTACAGC | |
| | | TCCAGCTCAAGCAGCAGATCAGGGAGCAGCGACAACTCAGATGTG | |
| | | GAATCCAACACCTCTTCCAGCAACTAGTGAAAACCCAGCAAAACTT | |
| | | GCATATCAATCCATGCCTACAGTAG | |
| CAF05723.1 | AJ620216.1 | ATGTACTTTTCCAGAAAAAGAAGACCCAAGAAGGAGAGGCCGCTG | 117 |
| | | CCACTGCGATACGTGTGTGGCCTACCGCCTAGCAGGCCTGATCCG | |
| | | ATGAGCTGGCGTCCACCTGCCCACGATGTCCCAGGACAAGAGGG | |
| | | CCTGTGGTACCGATCAGTTTTTACTTCTCATGGCGCTTTTTGTGGT | |
| | | TGCGGTGATTTTGTGGGTCATCTTCAGAGACTTAGCGAACGCCTG | |
| | | GGTAGACCCCAACCACCAAGACCACCGGGCGAACCGCCGGGCCC | |
| | | TGCTGTGAGAGTTCTGCCTGCCCTGCCGCCTCCGGTACCTGAACC | |
| | | AAGAAGACACGTCCAGAGAGAGAACCCGGGATGTGGTGGTGGAG | |
| | | ACGCCGCAGATGGAGGGCCCCATGGAGAAGGAGGCGATGGAGAC | |
| | | GACGCAGACCTCGGACCAGAAGATTTAGACGAGCTGCTCGACGTC | |
| | | CTAGACGCCCCAGAGTAA | |
| CAF05724.1 | AJ620216.1 | ATGTGGTGGTGGAGACGCCGCAGATGGAGGGCCCCATGGAGAAG | 118 |
| | | GAGGCGATGGAGACGACGCAGACCTCGGACCAGAAGATTTAGAC | |
| | | GAGCTGCTCGACGTCCTAGACGCCCCAGAGTAAGGAGACCTCGG | |
| | | CGCCGCAGGGGGTGGGCTCGTAGATATAGACTTAGAAGGAGGCG | |
| | | AAGGAGGAGAAGAAGGAGAAAGCTTATACTAACACAATGGCAGCC | |
| | | AGCAAAAATAAGAAAATGTCTAGTAATAGGTTATCTTGCTCTAGTAC | |
| | | TATGTGGGAACGGGACATTCAGTAAAAACTATGCCTCCCACTCAGA | |
| | | TGACTATGTACAGAAAGGACCCTTTGGAGGGGGACTAAGCAGCAT | |
| | | GAGATTTAACATGAGAATACTATATGATCAATTTAAAAGACACCTTA | |
| | | ACTTCTGGACACACACGAACCAGGACCTAGACCTAGTTAGATACA | |
| | | GAGGCTGCACCATGACATTTTATAGACACCCAGAGGTGGACTTCA | |
| | | TAGTAAAATTCAACAGAAAACCTCCATTCCTAGACACAATAGTATCA | |
| | | GGTCCAGCCATGCACCCAGGCATGCTAATGACAACAAAACACAAA | |
| | | ATACTAGTAAAAAGCTTTAAAACAAAACCCAAAGGAAAAGGCACAG | |
| | | TAAAGGTGCGCATTCGCCCCCCCACACTCTTTGACGACCGTTGGT | |
| | | ACTTTCAACATGACATCTGCAAAACCACACTGTTCACCATTAGCGC | |
| | | AACACCATGTGACCTGCGGTTTCCGTTCTGCTCACCACAAACTGAC | |
| | | AACCCTTGCGTCAACTTCCTAGTTCTTGCAGGAGTGTATAACGGCA | |
| | | AACTTAGCATAGAACCCACAAACGTAGAATCACAATATAATTCACTA | |
| | | CTTTCAGCTATAGAGACGAACACCCAAGGCACTCTATTTAATACAT | |
| | | TTAAAACACCAGAAATGATAAAGTGCCCCGCAGCAGGAAAAGCCC | |
| | | CAGAAACTGGAGACATATCCACAAACTGCTACAAAAAACTAGACAG | |
| | | CGCCTGGGGAGACACTATATGGAACCAAAACACCATAGCCAACTT | |
| | | TAAAAAGAACACAGACAACTTGTGGAATGCAGGACACAATCAAACA | |
| | | ATGACTGGTAGCAAATACCTAAACTACAGAACAGGAATATACAGTG | |
| | | CCATATTCCTTTCAGCAGGCAGACTGTCACCAGACTTTCCAGGACT | |
| | | ATACGATGACATAGTATACAATCCCACCACAGACGAAGGCATAGG | |
| | | AAACATTGTGTGGATAGACTGGTGTACAAAAGCAGACTGCAACTTC | |
| | | AATGAGACACAGTCCAAAGGAGTAATAAAAGACATTCCACTGTGG | |
| | | GCAGCACTGTTTGGCTATGTAGACTTTCTAAAAAAGACATTTAAAG | |
| | | ACGACCAGCTAGACAAAACTGCCAGACTCACTCTCATAAGCCCCT | |
| | | ATACAAAGCCTCAACTAATAGGACCTACACAACCCAACAAAGGGTT | |
| | | TGTTCCGTACGACTACAACTTTGGCAGAGCACACATGCCCTCCGG | |
| | | AGAATCCTACATACCTATGTACTACAGATTTAGATGGTACATCTGC | |
| | | CTATTTCACCAACAAAAGTTTATAGACAACATTGTAAGCAGCGGGC | |
| | | CCTTCGCATACCACGGCTCACAGCCCTCAGCAACTCTCACCACTA | |
| | | AATACAAATTCCACTTTCTCTTTGGGGGCAACCCCGTTCCCCAACA | |
| | | GACTGTCAGAGACCCTTGTAACCAACCAGTCTTTGACATTCCCGGA | |
| | | GCCGGTGGACTCCCTCGTCCGATACAAGTCGTTGACCCGAAATAC | |
| | | GTCAACGAAGGCTACACGTTCCACGCCTGGGACTTCCGTAGAGGG | |
| | | CTCTTTGGCCAAGCAGCTATTAAAAGAGTGTCGGGAGAACAAACA | |
| | | AATGCTTCACTTTATTCATCAGGCCCAAAACGGCCAAGAACAGAAA | |
| | | TTCCTCCAGAAAATGCAGAAGAAGGCTCATATTCCAGGGAACAAAA | |
| | | ACTCCAGCCCTGGCTCGACTCGAGCGACCAGGAAGGGAGCGAGA | |
| | | CAGAAGCCCCAGAAGAAGAAGCGACCTCGCCGCCGTCGCTACAG | |
| | | CTCCAGCTCAAGCAGCAGATCAGGGAGCAGCGACAACTCAGATGT | |
| | | GGAATCCAACACCTCTTCCAGCAACTAGTGAAAACCCAGCAAAACT | |
| | | TGCATATCAACCCATGCCTACAATAG | |
| CAF05725.1 | AJ620217.1 | ATGTACTTTTCCAGAAAAAGAAGACCCAAGAAGGAGAGGCCGCTG | 119 |
| | | CCACTGCGATACGTGTGTGGCCTACCGCCTAGCAGGCCTGATCCG | |
| | | ATGAGCTGGCGTCCACCTGCCCACGATGTCCCAGGACAAGAGGG | |
| | | CCTGTGGTACCGATCAGTTTTTACTTCTCATGGCGCTTTTTGTGGT | |
| | | TGCGGTGATTTTGTGGGTCATCTTCAGAGACTTAGCGAACGCCTG | |
| | | GGTAGACCCCAACCACCAAGACCACCGGGCGGACCGCCGGGCCC | |
| | | TGCTGTGAGAGCTCTGCCTGCCCTGCCGCCTCCGGAGCCTGAAC | |
| | | CAAGAAGACACGTCCAGAGAGAGAACCCGGGATGTGGTGGTGGA | |
| | | GACGCCGCAGATGGAGGGCCCCATGGAGAAGGAGGCGATGGAG | |
| | | ACGACGCAGACCTCGGACCAGAAGATTTAGACGAGCTGCTCGACG | |
| | | TCCTAGACGCCCCAGAGTAA | |
| CAF05726.1 | AJ620217.1 | ATGTGGTGGTGGAGACGCCGCAGATGGAGGGCCCCATGGAGAAG | 120 |
| | | GAGGCGATGGAGACGACGCAGACCTCGGACCAGAAGATTTAGAC | |
| | | GAGCTGCTCGACGTCCTAGACGCCCCAGAGTAAGGAGACCTCGG | |
| | | CGCCGCAGGGGGTGGGCTCGTAGATATAGACTTAGAAGGAGGCG | |
| | | GAGGAGGAGAAGAAGGAGAAAGCTTATACTAACACAATGGCAGCC | |
| | | AGCAAAAATAAGAAAATGTCTAGTAATAGGTTATCTTGCTCTAGTAC | |
| | | TATGTGGAAACGGGACATTCAGTAAAAACTATGCCTCGCACTCAGA | |
| | | TGACTATGTACAGAAAGGACCCTTTGGAGGGGGACTAAGCAGCAT | |
| | | GAGATTTAACATGAGAGTACTATATGATCAATTTAAAAGACACCTTA | |
| | | ACTTCTGGACACACACAAACCAGGACCTAGACCTAGTTAGATACAG | |
| | | AGGCTGCACCATGACATTTTATAGACACCCAGAGGTGGACTTCATA | |
| | | GTAAAATTCAACAGAAAACCTCCATTCCTAGACACAATAGTATCAG | |
| | | GTCCAGCCATGCACCCAGGCATGCTAATGACAACAAAACACAAAA | |
| | | TACTAGTAAAAAGCTTTAAAACAAAACCCAAAGGAAAAGGCACAGT | |
| | | AAAGGTGCGCATTCGCCCCCCCACACTCTTTGACGGCCGTTGGTA | |
| | | CTTTCAACATGACATCTACAAAACCACACTGTTCACCATTAGCGCA | |
| | | ACACCGTGTGACCTGCGGTTTCCGTTCTGCTCACCACAAACTGAC | |
| | | AACCCTTGCGTCAACCTCCTAGTTCTTGCAGGAGTGTATAACGGCA | |
| | | AACTTAGCATAGAAGCCACAAAGTTAGAATCACAATATAATTCACTA | |
| | | GTTTCATCTATAGAAATACCCACCCAAGGCACTCTATTTAATACATT | |
| | | TAAAACACCAGAAATGATAAAGTGCCCCCCAGCAGTAAAAGCCTC | |
| | | AGAACATTCAGACGTAAACAGAAACTGCTACAAAAAACTAGACAGC | |
| | | GCCTGGGGAGACACTATATGGAACCCGAGCACCATACAGAACTTT | |
| | | AAAGAAAACACAGAGAAGTTGTGGGAAGCAAGAGGCAACCAAACA | |
| | | ATGACTGGTAGCAAATACCTAAACTACAGAACAGGAATATACAGTG | |
| | | CCATATTCCTTTCAGCAGGCAGACTGTCACCAGACTTTGGGGGAC | |
| | | TATACAATGACATAGTATACAATCCCACCACAGACGAAGGCATAGG | |
| | | AAACATTGTGTGGATAGACTGGTGTACAAAAGCAGACTGCAACTTC | |
| | | AATGAGACACAGTCCAAAGGGGTAATAAAAGACATTCCACCGTGG | |
| | | GCAGCACTGTTTGGCTATGTAGACTTTCTAAAAAAGACATTTAAAG | |
| | | ACGAACAGCTAGACAAAATTGCCAGACTCACTCTCATAAGCCCCTA | |
| | | TACAAAGCCTCAACTAATAGGACCTACACAACCCAACAAAGGGTTT | |
| | | GTTCCGTACGACTACAACTTTGGCAGAGCACACATGCCCTCCGGA | |
| | | GAATCCTACATACCTATGTACTACAGATTTAGATGGTACATCTGCC | |
| | | TATTTCACCAACAAAAGTTTATAGACGACATTGTAAGCAGCGGGCC | |
| | | CTTCGCATACCACGGCTCACAGCCCTCAGCAACTCTCACCACTAA | |
| | | ATACAAATTCCACTTTCTCTTTGGGGGCAACCCCGTTCCCCAACAG | |
| | | ACTGTCAGAGACCCTTGTAACCAACCAGTCTTTGACATTCCCGGAG | |
| | | CCGGTGGACTCCCTCGTCCGATACAAGTCGTTGACCCGAAATACG | |
| | | TCAACGAAGGCTACACGTTCCACGCCTGGGACTTCCGTAGAGGGC | |
| | | TCTTTGGCCAAGCAGCTATTAAAAGAGTGTCGGGAGAACAAACAAA | |
| | | TGCTTCACTTTATTCATCAGGTCCAAAACGGCCAAGAACAGAAATT | |
| | | CCTCCACAAAATGCAGAAGAAGGCTCATATTCCAGGGAACAAAAA | |
| | | CTCCAGCCCTGGCTCGACTCGAGCGACCAGGAAGAGAGCGAGAC | |
| | | AGAAGCCCCAGAAGAAGAAGCGACCTCGCCACCGTCGCTACAGC | |
| | | TCCAGCTCAAGCAGCAGATCAGGGAGCAGCGACAACTCAGATGTG | |
| | | GAATCCAACACCTCTTCCAGCAACTAGTGAAAACCCAGCAAAACTT | |
| | | GCATATCAACCCATGCCTACAATAG | |
| CAF05727.1 | AJ620218.1 | ATGCGTTTTCGCAGGGTTGCCCAGAAAAGGAAAGTGCTTTTGCAA | 121 |
| | | ACTGTGCCAGCTGCAAAGAAGGCTAGGCGGCTTCTAGGTATGTGG | |
| | | CAGCCCCCCACGCACAATGTCCCGGGCATCGAGAGAAACTGGTA | |
| | | CGAGAGCTGTTTTAGATCCCACGCTGCTGTTTGTGGCTGTGGCGA | |
| | | TTTTGTTGGCCATCTTAATCATCTGGCAACTACTCTGGGTCGTCCT | |
| | | CCGCGTCCTGGGCCCCCAGGCGGACCCCGCACGCCGCAAATAAG | |
| | | AAACCTGCCAGCGCTCCCGGCGCCCCAGGGCGAGCCCGGTGACA | |
| | | GAGCGTCATGGCGTGGGGCTTCTGGGGCCGACGCCGCCGGTGG | |
| | | AGACGATGGAGAGCGCGGCGCAGACGGTGGAGACCCCGCAGAC | |
| | | GTAGGAGACGACGCCCTCCTCGCCGCTTTCGAGCTCGTCGAAGA | |
| | | GTAA | |
| CAF05728.1 | AJ620218.1 | ATGGCGTGGGGCTTCTGGGGCCGACGCCGCCGGTGGAGACGAT | 122 |
| | | GGAGAGCGCGGCGCAGACGGTGGAGACCCCGCAGACGTAGGAG | |
| | | ACGACGCCCTCCTCGCCGCTTTCGAGCTCGTCGAAGAGTAAGGAG | |
| | | GCGCGGGGGGAGGTGGCGCAGACGCTACAGAAAATGGCGACGG | |
| | | GGCAGACGCAGACGGACTCACAGAAAAAAGATAGTCATAAAACAG | |
| | | TGGCAACCTAACTTTATAAGACGCTGCTACATCATAGGGTACTTAC | |
| | | CACTTATATTCTGCGGCGAAAATACAACCGCCCAGAACTTTGCCAC | |
| | | TCACTCGGACGACATGATAAGCAAAGGACCGTACGGGGGGGGCA | |
| | | TGACTACCACCAAATTCACTCTGAGAATACTGTACGACGAGTTTAC | |
| | | CAGGTTTATGAACTTTTGGACTGTCAGTAACGAAGACCTAGACCTG | |
| | | TGTAGATACGTGGGCTGCAAACTAATATTTTTTAAACACCCCACGG | |
| | | TGGACTTTATAGTACAGATAAACACTCAGCCTCCTTTCTTAGACAC | |
| | | GCACCTCACCGCGGCCAGCATACACCCGGGCATCATGATGCTCA | |
| | | GCAAGAGACACATACTAATACCCTCTCTAAAGACCCGGCCCAGCA | |
| | | GAAAACACAGGGTGGTCGTCAGGGTGGGCGCCCCAAGACTTTTTC | |
| | | AGGACAAGTGGTACCCCCAGTCAGACCTGTGTGACACAGTTCTGC | |
| | | TTTCCATATTCGCAACCGCCTGCGACTTGCAATATCCGTTCGGCTC | |
| | | ACCACTAACTGACAACCCTTGCGTCAACTTCCAGATCCTGGGGCC | |
| | | CCAGTACAAAAAACACCTTAGTATTAGCTCCACTATGGATGACACT | |
| | | AACAAAGCACATTATGAAGAAAACTTATTTAAGAAAATTGAACTATA | |
| | | CAACACCTTTCAAACCATAGCTCAGCTTAAAGAGACAGGAACAATT | |
| | | TCAGGCATGCAACCTTCTTGGACTGAAGTCCAGAATTCAAAAACAC | |
| | | TTAATGAAACAGGTAGCAATGCCACTGAGAGTAGAGACACTTGGTA | |
| | | TAAAGGAAATACATACAACGACAAGATACACCAGTTAGCAGAAAAA | |
| | | ACCAGAAAGAGATTTAAAAATGCAACAAAAGCAGCACTACCAAACT | |
| | | ACCCCACAATAATGTCCGCAGACTTATATGAATACCACTCAGGCAT | |
| | | ATACTCCAGCATATATCTATCAGCTGGCAGGAGCTACTTTGAAACC | |
| | | ACCGGGGCCTACTCTGACATTATATACAACCCTTTCACAGACAAGG | |
| | | GCACAGGCAACATAATCTGGATAGACTACCTCACAAAAGAAGACA | |
| | | CCATTTTTGTAAAAAACAAAAGCAAATGCGAGATAATGGACATGCC | |
| | | CCTGTGGGCGGCCTGCACAGGATACACAGAGTTTTGTGCAAAGTA | |
| | | TACAGGCGACTCTGCCATTATTTACAATGCAAGAATAGTCATAAGA | |
| | | TGCCCATACACTGAGCCCATGTTAATAGACCACTCAGACCCAAACA | |
| | | AAGGCTTCGTTCCCTACTCATTTAGCTTTGGCAACGGAAAGATGCC | |
| | | CGGAGGCAGCTCCAACGTGCCCATAAGAATGAGAGCCAAGTGGTA | |
| | | CGTGAACATATTCCACCAAAAAGAAGTATTGGAGAGCATAGTACAG | |
| | | TCCGGACCGTTTGGGTACAAGGGCGACATAAAATCAGCTGTACTA | |
| | | GCCATGAAATACAGATTTCACTGGAAGTGGGGCGGAAACCCTATA | |
| | | TCCAAACAGGTCGTCAGGAATCCCTGCTCCAACTCCAGCTCATCC | |
| | | GCGGCCCATAGAGGACCTCGCAGCGTACAAGCGGTTGACCCGAA | |
| | | ATACAATACCCCAGAGGTCACGTGGCACTCGTGGGACATTAGACG | |
| | | AGGACTCTTTGGCAAAGCAGGTATTAAAAGAATGCAACAGGAATCA | |
| | | GATGCTCTTTACATTCCTCCAGGACCAATCAAGAGACCTCGCAGG | |
| | | GACACCAACGCCCAAGACCCAGAAGAGCAAAACGAAAGCTCAGGT | |
| | | TTCAGAGTCCAGCAGCGACTCCCGTGGGTCCACTCCAGCCAAGAG | |
| | | ACGCAAAGCTCCCAAGAAGAGACGGAGGCGCAGGGGTCGGTACA | |
| | | AGACCAACTACTCCTCCAGCTCCGAGAGCAGCGAGTTCTCCGACT | |
| | | CCAGCTCCAGCAACTCGCAACCCAAGTCCTCAAAGTCCAAGCAGG | |
| | | GCACAGCCTACACCCCCTATTATCTTCCCAAGCATAA | |
| CAF05729.1 | AJ620219.1 | ATGCGTTTTCGCAGGGTTGCCCAGAAAAGGAAAGTGCTTTTGCAA | 123 |
| | | ACTGTGCCAGCTGCAAAGAAGGCTAGGCGGCTTCTAGGTATGTGG | |
| | | CAGCCCCCCACGCATAATGTCCCGGGCATCGAGAGAAACTGGTAC | |
| | | GAGAGCTGTTTTAGATCCCACGCTGCTGTTTGTGGCTGTGGCGAT | |
| | | TTTGTTGGCCATCTTAATCATCTGGCAACTACTCTGGGTCGTCCTC | |
| | | CGCGTCCTGGGCCCCCAGGCGGACCCCGCACGCCGCAAATAAGA | |
| | | AACCTGCCAGCGCTCCCGGCGCCCCAGGGCGAGCCCGGTGACA | |
| | | GAGCGTCATGGCGTGGGGCTTCTGGGGCCGACGCCGCCGGTGG | |
| | | AGACGATGGAGAGCGCGGCGCAGACGGTGGAGACCCCGCAGAC | |
| | | GTAGGAGACGACGCCCTCCTCGCCGCTTTCGAGCTCGTCGAAGA | |
| | | GTAA | |
| CAF05730.1 | AJ620219.1 | ATGGCGTGGGGCTTCTGGGGCCGACGCCGCCGGTGGAGACGAT | 124 |
| | | GGAGAGCGCGGCGCAGACGGTGGAGACCCCGCAGACGTAGGAG | |
| | | ACGACGCCCTCCTCGCCGCTTTCGAGCTCGTCGAAGAGTAAGGAG | |
| | | GCGCGGGGGGAGGTGGCGCAGACGCTACAGAAAATGGCGACGG | |
| | | GGCAGACGCAGACGGACTCACAGAAAAAAGATAGTCATAAAACAG | |
| | | TGGCAACCTAACTTTATAAGACGCTGCTACATCATAGGGTACTTAC | |
| | | CACTTATATTCTGCGGCGAAAATACAACCGCCCAGAACTTTGCCAC | |
| | | TCACTCGGACGACATGATAAGCAAAGGACCGTACGGGGGGGGCA | |
| | | TGACTACCACCAAATTCACTCTGAGAATACTGTACGACGAGTTTAC | |
| | | CAGGTTTATGAACTTTTGGACTATCAGTAACGAAGACCTAGACCTG | |
| | | TGTAGATACGTGGGCTGCAAACTAATATTTTTTAAACACCCCACGG | |
| | | TGGACTTTATAGTACAGATAAACACTCAGCCTCCTTTCTTAGACAC | |
| | | GCACCTCACCGCGGCCAGCATACACCCGGGCATCATGATGCTCA | |
| | | GCAAGAGACACATACTAATACCCTCTCTAAAGACCCGGCCCAGCA | |
| | | GAAAACACAGGGTGGTCGTCAGGGTGGGCGCCCCAAGACTTTTTC | |
| | | AGGACAAGTGGTACCCCCAGTCAGACCTGTGTGACACAGTTCTGC | |
| | | TTTCCATATTCGCAACCGCCTGCGACTTGCAATATCCGTTTGGCTC | |
| | | ACCACTAACTGACAACCCTTGCGTCAACTTCCAGATCCTGGGGCC | |
| | | CCAGTACAAAAAACACCTTAGTATTAGCTCCACTATGGATGAAAGT | |
| | | AACATATCACATTATAAAGAAAACTTATTTAAGAAAACTGAACTATA | |
| | | CAACACCTTTCAAACCATAGCTCAGCTTAAAGAGACAGGAAACATT | |
| | | TCAGGCATTAGTCCTAATTGGACTGAAGTCCAGAATTCAACAACAC | |
| | | TTAATCAAACAGGTGACAATGCCACTAACAGTAGAGACACTTGGTA | |
| | | TAAAGGAAATACATACAACCACAAGATATGCGACTTAGCAGAAAAA | |
| | | ACCAGAAACAGATTTAAAAATGCAACCAAAGCAGCACTACCAAACT | |
| | | ACCCCACAATAATGTCCACAGACCTATATGAATACCACTCAGGCAT | |
| | | ATACTCCAGCATATATTTATCAGCTGGCAGGAGCTACTTTGAAACC | |
| | | ACCGGGGCCTACTCTGACATTATATACAACCCTTTCACAGACAAAG | |
| | | GCACAGGCAACATAATCTGGATAGACTACCTCACAAAAGAAGACA | |
| | | CCATTTTTGTAAAAAACAAAAGCAAATGCGAGATAATGGACATGCC | |
| | | CCTGTGGGCGGCCTGCACAGGATACACAGAGTTTTGTGCAAAGTA | |
| | | TACAGGCGACTCTGCCATTATCTACAATGCAAGAATACTCATAAGA | |
| | | TGCCCATACACTGAGCCCATGTTAATAGACCACTCAGACCCAAACA | |
| | | AAGGCTTCGTTCCCTACTCATTTAACTTTGGCAACGGAAAGATGCC | |
| | | CGGAGGCAGCTCCAACGTACCCATAAGAATGAGAGCCAAATGGTA | |
| | | CGCGAACATATTCCACCAAAAGGAGGTTCTAGAGGCTATAGTACAA | |
| | | AGCGGACCGTTCGGGTACAAGGGCGACATAAAATCAGCTGTACTA | |
| | | GCCATGAAATACAGATTTCACTGGAAGTGGGGCGGAAACCCTATA | |
| | | TCCAAACAGGTCGTCAGGAATCCCTGCTCCAACTCCAGCTCATCC | |
| | | GCGGCCCATAGAGGACCTCGCAGCGTACAAGCGGTTGACCCGAA | |
| | | ATACAATACCCCAGAGGTCACGTGGCACTCGTGGGACATTAGACG | |
| | | AGGACTCTTTGGCAAAGCAGGTATTAAAAGAATGCAACAGGAATCA | |
| | | GATGCTCTTTACATTCCTCCAGGACCAATCAAGAGACCTCGCAGG | |
| | | GACACCAACGCCCAAGACCCAGAAGAGCAAAACGAAAGCTCAGGT | |
| | | TTCAGAGTCCAGCAGCGACTCCCGTGGGTCCACTCCAGCCAAGAG | |
| | | ACGCAAAGCTCCCAAGAAGAGACGGAGGCGCAGGGGTCGGTACA | |
| | | AGACCAACTACTCCTCCAGCTCCGAGAGCAGCGAGTTCTCCGACT | |
| | | CCAGCTCCAGCAACTCGCAGCCCAAGTCCCCAAAGTCCAAGCAGG | |
| | | GCACAGCCTACACCCCCTATTATCTTCCCAAGCATAA | |
| CAF05731.1 | AJ620220.1 | ATGCGTTTTCGCAGGGTTGCCCAGAAAAGGAAAGTGCTTTTGCAA | 125 |
| | | ACTGTGCCAGCTGCAAAGAAGGCTAGGCGGCTTCTAGGTATGTGG | |
| | | CAGCCCCCCACGCACAATGTCCCGGGCATCGAGAGAAACTGGTA | |
| | | CGAGAGCTGTTTTAGATCCCACGCTGCTGTTTGTGGCTGTGGCGA | |
| | | TTTTGTTGGCCATCTTAATCATCTGGCAACTACTCTGGGTCGTCCT | |
| | | CCGCGTCCTGGGCCCCCAGGCGGACCCCGCACGCCGCAAATAAG | |
| | | AAACCTGCCAGCGCTCCCGGCGCCCCAGGGCGAGCCCGGTGACA | |
| | | GAGCGTCATGGCGTGGGGCTTCTGGGGCCGACGCCGCCGGTGG | |
| | | AGACGATGGAGAGCGCGGCGCAGACGGTGGAGACCCCGCAGAC | |
| | | GTAGGAGACGACGCCCTCCTCGCCGCTTTCGAGCTCGTCGAAGA | |
| | | GTAA | |
| CAF05732.1 | AJ620220.1 | ATGGCGTGGGGCTTCTGGGGCCGACGCCGCCGGTGGAGACGAT | 126 |
| | | GGAGAGCGCGGCGCAGACGGTGGAGACCCCGCAGACGTAGGAG | |
| | | ACGACGCCCTCCTCGCCGCTTTCGAGCTCGTCGAAGAGTAAGGAG | |
| | | GCGCGGGGGGAGGTGGCGCAGACGCTACAGAAAATGGCGACGG | |
| | | GGCAGACGCAGACGGACTCACAGAAAAAAGATAGTCATAAAACAG | |
| | | TGGCAACCAAACTTTATAAGACGCTGCTACATCATAGGGTACTTAC | |
| | | CACTTATATTCTGCGGCGAAAATACAACCGCCCAGAACTTTGCCAC | |
| | | TCACTCGGACGACATGATAAGCAAAGGACCGTACGGGGGGGGCA | |
| | | TGACTACCACCAAATTCACTCTGAGAATACTGTACGACGAGTTTAC | |
| | | CAGGTTTATGAACTTTTGGACTGTCAGTAACGAAGACCTAGACCTG | |
| | | TGTAGATACGTGGGCTGCAAACTAATATTTTTTAAACACCCCACGG | |
| | | TGGACTTTATAGTACAGATAAACACTCAGCCTCCTTTCTTAGACAC | |
| | | GCACCTCACCGCGGCCAGCATACACCCGGGCATCATGATGCTCA | |
| | | GCAAGAGACACATACTAATACCCTCTCTAAAGACCCGGCCCAGCA | |
| | | GAAAACACAGGGTGGTCGTCAGGGTGGGCGCCCCAAGACTTTTTC | |
| | | AGGACAAGTGGTACCCCCAGTCAGACCTGTGTGACACAGTTCTGC | |
| | | TTTCCATATTCGCAACCGCCTGCGACTTGCAATATCCGTTCGGCTC | |
| | | ACCACTAACTGACAACCCTTGCGTCAACTTCCAGATCCTGGGGCC | |
| | | CCAGTACAAAAAACACCTTAGTATTAGCTCCACTATGGATGACACT | |
| | | AACAAAGCACATTATGAAGAAAACTTATTTAATAAAACTGAACTATA | |
| | | CAACACCTTTCAAACCATAGCTCAGCTTAGAGACACAGGACAAACT | |
| | | ACAAACGCTAGTCCTAATTGGAATCAGGTCCAGAATACAGCAGCA | |
| | | CTTGAGTTATCAGGTGCAAATGCCACTAGCAGCAAAGACACTTGGT | |
| | | ATAAAGGTAATACATACACGAAAGACATATCAAAGTTAGCAGAAAA | |
| | | AACCAGACAAAGATTTAAAGCTGCAACAATAGCAGCACTACCAAAC | |
| | | TACCCCACAATAATGTCCACAGACCTATATGAATACCACTCAGGCA | |
| | | TATACTCCAGCATATATTTATCAGCTGGCAGGAGCTACTTTGAAAC | |
| | | CACCGGGGCCTACTCTGACATTATATACAACCCTTTCACAGACAAA | |
| | | GGCACAGGCAACATAATCTGGATAGACTACCTCACAAAAGAAGAC | |
| | | ACCATTTTTGTAAAAAACAAAAGCAAATGCGAGATAATGGACATGC | |
| | | CCCTGTGGGCGGCCTGCACAGGATACACAGAGTTTTGTGCAAAGT | |
| | | ATACAGGCGACTCTGCCATTATCTACAATGCAAGAATACTCATAAG | |
| | | ATGCCCACACACTGAGCCCATGTTAATAGACCACTCAGACCCAAA | |
| | | CAAAGGCTTCGTTCCCTACTCATTCGACTTTGGCAATGGAAAGATG | |
| | | CCCGGAGGCAGCTCCAACGTACCGATAAGAATGAGGGCCAAATG | |
| | | GTACGTGAACATATTCCACCAAAAGGAGGTTCTAGAGGCTATAGTA | |
| | | CAAAGCGGACCGTTCGGGTACAAGGGCGACATAAAATCAGCTGTA | |
| | | CTAGCCATGAAATACAGATTTCACTGGAAGTGGGGCGGAAACCCT | |
| | | ATATCCAAACAGGTCGTCAGGAATCCCTGCTCCAACTCCAGCTCAT | |
| | | CCGCGGCCCATAGAGGACCTCGCAGCGTACAAGCGGTTGACCCG | |
| | | AAATACAATACCCCAGAGGTCACGTGGCACTCGTGGGACATTAGA | |
| | | CGAGGACTCTTTGGCAAAGCAGGTATTAAAAGAATGCAACAGGAA | |
| | | TCAGATGCTCTTTACATTCCTCCAGGACCAATCAAGAGACCTCGCA | |
| | | GGGACACCAACGCCCAAGACCCAGAAGAGCAAAACGAAAGCTCA | |
| | | GGTTTCAGAGTCCAGCAGCGACTCCCGTGGGTCCACTCCAGCCAA | |
| | | GAGACGCAAAGCTCCCAAGAAGAGACGGAGGCGCAGGGGTCGGT | |
| | | ACAAGACCAACTACTCCTCCAGCTCCGAGAGCAGCGAGTTCTCCG | |
| | | ACTCCAGCTCCAGCAACTCGCAACCCAAGTCCTCAAAGTCCAAGC | |
| | | AGGGCACAGCCTACACCCCCTATTATCTTCCCAAGCATAA | |
| CAF05733.1 | AJ620221.1 | ATGCGTTTTCGCAGGGTTGCCCAGAAAAGGAAAGTGCTTTTGCAA | 127 |
| | | ACTGTGCCAGCTGCAAAGAAGGCTAGGCGGCTTCTAGGTATGTGG | |
| | | CAGCCCCCCACGCACAATGTCCCGGGCATCGAGAGAAACTGGTA | |
| | | CGAGAGCTGTTTTAGATCCCACGCTGCTGTTTGTGGCTGTGGCGA | |
| | | TTTTGTTGGCCATCTTAATCATCTGGCAACTACTCTGGGTCGTCCT | |
| | | CCGTGTCCTGGGCCCCCAGGCGGACCCCGCACGCCGCAAATAAG | |
| | | AAACCTGCCAGCGCTCCCGGCGCCCCAGGGCGAGCCCGGTGACA | |
| | | GAGCGCCATGGCGTGGGGCTTCTGGGGCCGACGCCGCCGGTGG | |
| | | AGACGATGGAGAGCGCGGCGCAGACGGTGGAGACCCCGCAGAC | |
| | | GTAGGAGACGACGCCCTACTCGCCGCTTTCGAGCTCGTCGAAGA | |
| | | GTAA | |
| CAF05734.1 | AJ620221.1 | ATGGCGTGGGGCTTCTGGGGCCGACGCCGCCGGTGGAGACGAT | 128 |
| | | GGAGAGCGCGGCGCAGACGGTGGAGACCCCGCAGACGTAGGAG | |
| | | ACGACGCCCTACTCGCCGCTTTCGAGCTCGTCGAAGAGTAAGGAG | |
| | | GCGCGGGGGGAGGTGGCGCAGACGCTACAGAAAATGGCGACGG | |
| | | GGCAGACGCAGACGGACTCATAGAAAAAAGATAGTCATAAAACAG | |
| | | TGGCAACCAAACTTTATAAGACGCTGCTACATCATAGGGTACTTAC | |
| | | CACTTATATTCTGCGGCGAAAATACAACCGCCCAGAACTTTGCCAC | |
| | | TCGCTCGGACGACATGATAAGCAAAGGACCGTACGGGGGGGGCA | |
| | | TGACTACCACCAAATTCACTCTGAGAATACTGTACGACGAGTTTAC | |
| | | CAGGTTTATGAACTTTTGGACTGTCAGTAACGAAGACCTAGACCTG | |
| | | TGTAGATACGTGGGCTGCAAACTAATATTTTTTAAACACCCCACGG | |
| | | TGGACTTTATAGTACAGATAAACACTCAGCCTCCTTTCTTAGACAC | |
| | | GCACCTCACCGCGGCCAGCATACACCCGGGCATCATGATGCTCA | |
| | | GCAAGAGACACATACTAATACCCTCTCTAAAGACCCGGCCCAGCA | |
| | | GAAAACACAGGGTGGTCGTCAGGGTGGGCGCCCCAAGACTTTTTC | |
| | | AGGACAAGTGGTACCCCCAGTCAGACCTGTGTGACACAGTTCTGC | |
| | | TTTCCATATTCGCAACCGCCTGCGACTTGCAATATCCGTTCGGCTC | |
| | | ACCACTAACTGACAACCCTTGCGTCAACTTCCAGATCCTGGGGCC | |
| | | CCAGTACAAAAAACACCTTAGTATTAGCTCCACTATGGATGAAAGT | |
| | | AACAAAGCACATTATGAACAAAACTTATTTAAGAAAACTGAACTATA | |
| | | CAACACCTTTCAAACCATAGCTCAGCTTAAAGAGACAGGAAACATT | |
| | | TCAGGCATTACTCCTACTTGGACTGAAGTCCAGAATTCAACAACAC | |
| | | TTAATCAAGCAGGTAACAATGCCACTGACAGTAGAGACACTTGGTA | |
| | | TAAAGGAAATACATACAACGAGAAGATATCCGAGTTAGCACAAATA | |
| | | ACCAGAAACAGATTTAAAAATGCAACCAAAACAGCACTACCAAACT | |
| | | ACCCCACAATAATGTCCACAGACCTATATGAATACCACTCAGGCAT | |
| | | ATACTCCAGCATATATTTATCAGCTGGCAGGAGCTACTTTGAAACC | |
| | | ACCGGGGCCTACTCTGACATTATATACAACCCTTTCACAGACAAAG | |
| | | GCACAGGCAACATAATCTGGATAGACTACCTCACAAAAGAAGACA | |
| | | CCATTTTTGTAAAAAACAAAAGCAAATGCGAGATAATGGACATGCC | |
| | | CCTGTGGGCGGCCTGCACAGGATACACAGAGTTTTGTGCAAAGTA | |
| | | TACAGGCGACTCTGCCATTATTTACAATGCAAGAATAGTCATAAGA | |
| | | TGCCCATACACTGAGCCCATGTTAATAGACCACTCAGACCCAAACA | |
| | | AAGGCTTCGTCCCCTACTCATTTAACTTTGGCAACGGAAAGATGCC | |
| | | CGGAGGCAGCTCCAACGTGCCCATAAGAATGAGAGCCAAGTGGTA | |
| | | CGTGAACATATTCCACCAAAAAGAAGTATTGGAGAGCATAGTACAG | |
| | | TCCGGACCGTTTGGGTACAAGGGCGACATAAAATCAGCTGTACTA | |
| | | GCCATGAAATACAGATTTCACTGGAAGTGGGGCGGAAACCCTATA | |
| | | TCCAAACAGGTCGTCAGGAATCCCTGCTCCAACTCCAGCTCATCC | |
| | | GCGGCCCATAGAGGACCTCGCAGCGTACAAGCGGTTGACCCGAA | |
| | | ATACAATACCCCAGAGGTCACGTGGCACTCGTGGGACATTAGACG | |
| | | AGGACTCTTTGGCAAAGCAGGTATTAAAAGAATGCAACAGGAATCA | |
| | | GATGCTCTTTACATTCCTCCAGGACCAATCAAGAGACCTCGCAGG | |
| | | GACACCAACGCCCAAGACCCAGAAGAGCAAAACGAAAGCTCAGGT | |
| | | TTCAGAGTCCAGCAGCGACTCCCGTGGGTCCACTCCAGCCAAGAG | |
| | | ACGCAAAGCTCCCAAGAAGAGACGGAGGCGCAGGGGTCGGTACA | |
| | | AGACCAACTACTCCTCCAGCTCCGAGAGCAGCGAGTTCTCCGACT | |
| | | CCAGCTCCAGCAACTCGCAACCCAAGTCCTCAAAGTCCAAGCAGG | |
| | | GCACAGCCTACACCCCCTATTATCTTCCCAAGCATAA | |
| CAF05735.1 | AJ620222.1 | ATGCGTTTTCGCAGGGTTGCCCAGAAAAGGAAAGTGCTTTTGCAA | 129 |
| | | ACTGTGCCAGCTGCAAAGAAGGCTAGGCGGCTTCTAGGTATGTGG | |
| | | CAGCCCCCCACGCACAATGTCCCGGGCATCGAGAGAAACTGGTA | |
| | | CGAGAGCTGTTTTAGATCCCACGCTGCTGTTTGTGGCTGTGGCGA | |
| | | TTTTGTTGGCCATCTTAATCATCTGGCAACTACTCTGGGTCGTCCT | |
| | | CCGCGTCCTGGGCCCCCAGGCGGACCCCGCACGCCGCAAATAAG | |
| | | AAACCTGCCAGCGCTCCCGGCGCCCCAGGGCGAGCCCGGTGACA | |
| | | GAGCGCCATGGCATGGGGCTTCTGGGGCCGACGCCGCCGGTGG | |
| | | AGACGATGGAGAGCGCGGCGCAGACGGTGGAGACCCCGCAGAC | |
| | | GTAGGAGACGACGCCCTACTCGCCGCTTTCGAGCTCGTCGAAGA | |
| | | GTAA | |
| CAF05736.1 | AJ620222.1 | ATGGCATGGGGCTTCTGGGGCCGACGCCGCCGGTGGAGACGATG | 130 |
| | | GAGAGCGCGGCGCAGACGGTGGAGACCCCGCAGACGTAGGAGA | |
| | | CGACGCCCTACTCGCCGCTTTCGAGCTCGTCGAAGAGTAAGGAG | |
| | | GCGCGGGGGGAGGTGGCGCAGACGCTACAGAAAATGGCGACGG | |
| | | GGCAGACGCAGACGGACTCATAGAAAAAAGATAGTCATAAAACAG | |
| | | TGGCAACCAAACTTTATAAGACGCTGCTACGTCATAGGGTACTTAC | |
| | | CACTTATATTCTGCGGCGAAAATACAACCGCCCAGAACTTTGCCAC | |
| | | TCACTCGGACGACATGATAAGCAAAGGACCGTACGGGGGGGGCA | |
| | | TGACTACCACCAAATTCACTCTGAGAATACTGTACGACGAGTTTAC | |
| | | CAGGTTTATGAACTTTTGGACTGTCAGTAACGAAGACCTAGACCTG | |
| | | TGTAGATACGTGGGCTGCAAACTAATATTTTTTAAACACCCCACGG | |
| | | TGGACTTTATAGTACAGATAAACACTCAGCCTCCTTTCTTAGACAC | |
| | | GCACCTCACCGCGGCCAGCATACACCCGGGCATCATGATGCTCA | |
| | | GCAAGAGACACATACTAATACCCTCTCTAAAGACCCGGCCCAGCA | |
| | | GAAAACACAGGGTGGTCGTCAGGGTGGGCGCCCCAAGACTTTTTC | |
| | | AGGACAAGTGGTACCCCCAGTCAGACCTGTGTGACACAGTTCTGC | |
| | | TTTCCATATTTGCAACCGCCTGCGACTTGCAATATCCGTTCGGCTC | |
| | | ACCACTAACTGACAACCCTTGCGTCAACTTCCAGATCCTGGGGCC | |
| | | CCAGTACAAAAAACACCTTAGTATTAGCTCCACTATGGATCAAACT | |
| | | AACGAAAACCATTATAAAGAAAACTTATTTAACAAAACTGAACTATA | |
| | | CAACACCTTTCAAACCATAGCTCAGCTTAAAGAGACAGGACACATT | |
| | | TCAGGCATTAGTCCTACTTGGAATGAAGTCCAGAATTCAACAACAC | |
| | | TTACTAAAGGAGGTGACAATGCCACTCAGAGTAGAGACACTTGGT | |
| | | ATAAAGGAAATACATACAACGAGAAGATATGCGAGTTAGCACAAAT | |
| | | AACCAGAAACAGATTTAAAAATGCAACCAAAGGAGCACTACCAAAC | |
| | | TACCCCACAATAATGTCCACAGACCTATATGAATACCACTCAGGCA | |
| | | TACACTCCAGCATATATCTATCAGCTGGCAGGAGCTACTTTGAAAC | |
| | | CACCGGGGCCTACTCTGACATTATATACAACCCTTTCACAGACAAA | |
| | | GGCACAGGCAACATAATCTGGATAGACTACCTCACAAAAGAAGAC | |
| | | ACCATTTTTGTGAAAAACAAAAGCAAATGCGAGATAATGGACATGC | |
| | | CCCTGTGGGCGGCCTGCACAGGATACACAGAGTTTTGTGCAAAGT | |
| | | ATACAGGCGACTCTGCCATTATCTACAATGCAAGAATACTCATAAG | |
| | | ATGCCCATACACTGAGCCCATGTTAATAGACCACTCAGACCCAAAC | |
| | | AAAAGCTTCGTTCCCTACTCATTTAACTTTGGCAACGGAAAGATGC | |
| | | CCGGAGGCAGCTCCAACGTGCCCATAAGAATGAGAGCCAAGTGG | |
| | | TACGTGAACATATTCCACCAAAAAGAAGTATTAGAGAGCATAGTAC | |
| | | AGTCCGGACCGTTTGGGTACAAGGGCGACATAAGATCAGCTGTAC | |
| | | TAGCCATGAAATACAGATTTCACTGGAAGTGGGGCGGAAACCCTA | |
| | | TATCCAAACAGGTCGTCAGGAATCCCTGCTCCAACTCCAGCTCCT | |
| | | CCGCGGCCCATAGAGGACCTCGCAGCGTACAAGCGGTTGACCCG | |
| | | AAATACAATACCCCAGAGGTCACGTGGCACTCGTGGGACATTAGA | |
| | | CGAGGACTCTTTGGCAAAGCAGGTATTAAAAGAATGCAACAGGAA | |
| | | TCAGATGCTCTTTACATTCCTCCAGGACCAATCAAGAGACCTCGCA | |
| | | GGGACACCAACGCCCAAGACCCAGAAGAGCAAAACGAAAGCTCA | |
| | | GGTTTCAGAGTCCAGCAGCGACTCCCGTGGGTCCACTCCAGCCAA | |
| | | GAGACGCAAAGCTCCCAAGAAGAGACGGAGGCGCAGGGGTCGGT | |
| | | ACAAGACCAACTACTCCTCCAGCTCCGAGAGCAGCGAGTTCTCCG | |
| | | ACTCCAGCTCCAGCAACTCGCAACCCAAGTCCTCAAAGTCCAAGC | |
| | | AGGGCACAGCCTACACCCCCTATTATCTTCCCAAGCATAA | |
| CAF05737.1 | AJ620223.1 | ATGCGTTTTCGCAGGGTTGCCCAGAAAAGGAAAGTGCTTTTGCAA | 131 |
| | | ACTGTGCCAGCTGCAAAGAAGGCTAGGCGGCTTCTAGGTATGTGG | |
| | | CAGCCCCCCACGCACAATGTCCCGGGCATCGAGAGAAACTGGTA | |
| | | CGAGAGCTGTTTTAGATCCCACGCTGCTGTTTGTGGCTGTGGCGA | |
| | | TTTTGTTGGCCATCTTAATCATCTGGCAACTACTCTGGGTCGTCCT | |
| | | CCGCGTCCTGGGCCCCCAGGCGGACCCCGCACGCCGCAAATAAG | |
| | | AAACCTGCCAGCGCTCCCGGCGCCCCAGGGCGAGCCCGGTGACA | |
| | | GAGCGCCATGGCATGGGGCTTCTGGGGCCGACGCCGCCGGTGG | |
| | | AGACGATGGAGAGCGCGGCGCAGACGGTGGAGACCCCGCAGAC | |
| | | GTAGGAGACGACGCCCTACTCGCCGCTTTCGAGCTCGTCGAAGA | |
| | | GTAA | |
| CAF05738.1 | AJ620223.1 | ATGGCATGGGGCTTCTGGGGCCGACGCCGCCGGTGGAGACGATG | 132 |
| | | GAGAGCGCGGCGCAGACGGTGGAGACCCCGCAGACGTAGGAGA | |
| | | CGACGCCCTACTCGCCGCTTTCGAGCTCGTCGAAGAGTAAGGAG | |
| | | GCGCGGGGGGAGGTGGCGCAGACGCTACAGAAAATGGCGACGG | |
| | | GGCAGACGCAGACGGACTCATAGAAAAAAGATAGTCATAAAACAG | |
| | | TGGCAACCAAACTTTATAAGACGCTGCTACATCATAGGGTACTTAC | |
| | | CACTTATATTCTGCGGCGAAAATACAACCGCCCAGAACTTTGCCAC | |
| | | TCACTCGGACGACATGATAAGCAAAGGACCGTACGGGGGGGGCA | |
| | | TGACTACCACCAAATTCACTCTGAGAATACTGTACGACGAGTTTAC | |
| | | CAGGTTTATGAACTTTTGGACTGTCAGTAACGGAGACCTAGACCTG | |
| | | TGTAGATACGTGGGCTGCAAACTAATATTTTTTAAACACCCCACGG | |
| | | TGGACTTTATAGTACAGATAAACACTCAGCCTCCTTTCTTAGACAC | |
| | | GCACCTCACCGCGGCCAGCATACACCCGGGCATCATGATGCTCA | |
| | | GCAAGAGACACATACTAATACCCTCTCTAAAGACCCGGCCCAGCA | |
| | | GAAAACACAGGGTGGTCGTCAGGGTGGGCGCCCCAAGACTTTTTC | |
| | | AGGACAAGTGGTACCCCCAGTCAGACCTGTGTGACACAGTTCTGC | |
| | | TTTCCATATTTGCAACCGCCTGCGACTTGCAATATCCGTTCGGCTC | |
| | | ACCACTAACTGACAACCCTTGCGTCAACTTCCAGATCCTGGGGCC | |
| | | CCAGTACAAAAAACACCTTAGTATTAGCTCCACTATGGATCAAACT | |
| | | AACGAAAACCATTATAAAGAAAACTTATTTAACAAAACTGAACTATA | |
| | | CAACACCTTTCAAACCATAGCTCAGCTTAAAGAGACAGGACACATT | |
| | | TCAGGCATTAGTCCTACTTGGAATGAAGTCCAGAATTCAACAACAC | |
| | | TTACTAAAGAAGGTGACAATGCCACTCAGAGTAGAGACACTTGGTA | |
| | | TAAAGGAAATACATACAACGGTAAGATATGCCAGTTAGCACAAATA | |
| | | ACCAGAAACAGGTTTAAAAATGCAACCAAAGGAGCACTACCAAACT | |
| | | ACCCCACAATAATGTCCACAGACCTATATGAATACCACTCAGGCAT | |
| | | ATACTCCAGCATATGTCTATCAGCTGGCAGGAGCTACTTTGAAACC | |
| | | ACCGGGGCCTACTCTGACATTATATACAACCCTTTCACAGACAAAG | |
| | | GCACAGGCAACATAATCTGGATAGACTACCTCACAAAAGAAGACA | |
| | | CCATTTTTGTGAAAAACAAAAGCAAATGCGAGATAATGGACATGCC | |
| | | CCTGTGGGCGGCCTGCACAGGATACACAGAGTTTTGTGCAAAGTA | |
| | | TACAGGCGACTCTGCCATTATCTACAATGCAAGAATACTCATAAGA | |
| | | TGCCCATACACTGAGCCCATGTTAATAGACCACTCAGACCCAAACA | |
| | | AAGGCTTCGTTCCCTACTCATTTAACTTTGGCAACGGAAAGATGCC | |
| | | CGGAGGCAGCTCCAACGTGCCCATAAGAATGAGAGCCAAGTGGTA | |
| | | CGTGAACATATTCCACCAAAAAGAAGTATTAGAGAGCATAGTACAG | |
| | | TCCGGACCGTTTGGGTACAAGGGCGACATAAAATCAGCTGTACTA | |
| | | GCCATGAAATACAGATTTCACTGGAAGTGGGGCGGAAACCCTATA | |
| | | TCCAAACAGGTCGTCAGGAATCCCTGCTCCAACTCCAGCTCCTCC | |
| | | GCGGCCCATAGAGGACCTCGCAGCGTACAAGCGGTTGACCCGAA | |
| | | ATACAATACCCCAGAGGTCACGTGGCACTCGTGGGACATTAGACG | |
| | | AGGACTCTTTGGCAAAGCAGGTATTAAAAGAATGCAACAGGAATCA | |
| | | GATGCTCTTTACATTCCTCCAGGACCAATCAAGAGACCTCGCAGG | |
| | | GACACCAACGCCCAAGACCCAGAAGAGCAAAACGAAAGCTCAGGT | |
| | | TTCAGAGTCCAGCAGCGACTCCCGTGGGTCCACTCCAGCCAAGAG | |
| | | ACGCAAAGCTCCCAAGAAGAGACGGAGGCGCAGGGGTCGGTACA | |
| | | AGACCAACTACTCCTCCAGCTCCGAGAGCAGCGAGTTCTCCGACT | |
| | | CCAGCTCCAGCAACTCGCAACCCAAGTCCTCAAAGTCCAAGCAGG | |
| | | GCACAGCCTACACCCCCTATTATCTTCCCAAGCATAA | |
| CAF05778.1 | AJ620224.1 | ATGCGTTTTCGCAGGGTTGCCCAGAAAAGGAAAGTGCTTTTGCAA | 133 |
| | | ACTGTGCCAGCTGCAAAGAAGGCTAGGCGGCTTCTAGGTATGTGG | |
| | | CAGCCCCCCACGCACAATGTCCCGGGCATCGAGAGAAACTGGTA | |
| | | CGAGAGCTGTTTTAGATCCCACGCTGCTGTTTGTGGCTGTGGCGA | |
| | | TTTTGTTGGCCATCTTAATCATCTGGCAACTACTCTGGGTCGTCCT | |
| | | CCGCGTCCTGGGCCCCCAGGCGGACCCCGCACGCCGCAAATAAG | |
| | | AAACCTGCCAGCGCTCCCGGCGCCCCAGGGCGAGCCCGGTGACA | |
| | | GAGCGCCATGGCATGGGGCTTCTGGGGCCGACGCCGCCGGTGG | |
| | | AGACGATGGAGAGCGCGGCGCAGACGGTGGAGATCCCGCAGAC | |
| | | GTAGGAGACGACGCCCTACTCGCCGCTTTCGAGCTCGTCGAAGA | |
| | | GTAA | |
| CAF05779.1 | AJ620224.1 | ATGGCATGGGGCTTCTGGGGCCGACGCCGCCGGTGGAGACGATG | 134 |
| | | GAGAGCGCGGCGCAGACGGTGGAGATCCCGCAGACGTAGGAGA | |
| | | CGACGCCCTACTCGCCGCTTTCGAGCTCGTCGAAGAGTAAGGAG | |
| | | GCGCGGGGGGAGGTGGCGCAGACGCTACAGAAAATGGCGACGG | |
| | | GGCAGACGCAGACGGACTCATAGAAAAAAGATAGTCATAAAACAG | |
| | | TGGCAACCAAACTTTATAAGACGCTGCTACATCATAGGGTACTTAC | |
| | | CACTTATATTCTGCGGCGAAAATACAACCGCCCAGAACTTTGCCAC | |
| | | TCACTCGGACGACATGATAAGCAAAGGACCGTACGGGGGGGGCA | |
| | | TGACTACCACCAAATTCACTCTGAGAATACTGTACGACGAGTTTAC | |
| | | CAGGTTTATGAACTTTTGGACTGTCAGTAACGAAGACCTAGACCTG | |
| | | TGTAGATACGTGGGCTGCAAACTAATATTTTTTAAACACCCCACGG | |
| | | TGGACTTTATAGTACAGATAAACACTCAGCCTCCTTTCTTAGACAC | |
| | | GCACCTCACCGCGGCCAGCATACACCCGGGCATCATGATGCTCA | |
| | | GCAAGAGACACATACTAATACCCTCTCTAAAGACCCGGCCCAGCA | |
| | | GAAAGCACAGGGTGGTCGTCAGGGTGGGCGCCCCAAGACTTTTT | |
| | | CAGGACAAGTGGTACCCCCAGTCAGACCTGTGTGACACAGTTCTG | |
| | | CTTTCCATATTTGCAACCGCCTGCGACTTGCAATATCCGTTCGGCT | |
| | | CACCACTAACTGACAACCCTTGCGTCAACTTCCAGATCCTGGGGC | |
| | | CCCAGTACAAAAAACACCTTAGTATTAGCTCCACTATGGATCAAAC | |
| | | TAACGAAAACCATTATAAAGAAAACTTATTTAACAAAACTGAACTAT | |
| | | ACAACACCTTTCAAACCATAGCTCAGCTTAAAGAGACAGGACACAT | |
| | | TTCAGGCATTAGTCCTACTTGGAATGAAGTCCAGAATTCAACAACA | |
| | | CTTACTAAAGGAGGTGACAATGCCACTCAGAGTAGAGACACTTGG | |
| | | TATAAAGGAAATACATACAACGAGAACATATGCAAGTTAGCAGAGG | |
| | | TAACCAGAAACAGATTTAAAAATGCAACCAAAGGAGCACTACCAAA | |
| | | CTACCCCACAATAATGTCCACAGACCTATATGAATACCACTCAGGC | |
| | | ATATACTCCAGCATATATCTATCAGCGGGCAGGAGCTACTTTGAAA | |
| | | CCACCGGGGCCTACTCTGACATTATATACAACCCTTTCACAGACAA | |
| | | AGGCACAGGCAACATAATCTGGATAGACTACCTCACAAAAGAAGA | |
| | | CACCATTTTTGTGAAAAACAAAAGCAAATGCGAAATAATGGACATG | |
| | | CCCCTGTGGGCGGCCTGCACGGGATACACAGAGTTTTGTGCAAAG | |
| | | TATACAGGCGACTCTGCCATTATCTACAATGCAAGAATACTCATAA | |
| | | GATGCCCATACACTGAGCCCATGTTAATAGACCACTCAGACCCAAA | |
| | | CAAAGGCTTCGTTCCCTACTCATTTAACTTTGGCAACGGAAAGATG | |
| | | CCCGGAGGCAGCTCCAACGTGCCCATAAGAATGAGAGCCAAGTG | |
| | | GTACGTGAACATATTCCACCAAAAAGAAGTATTAGAGAGCATAGTA | |
| | | CAGTCCGGACCGTTTGGGTACAAGGGCGACATAAAATCAGCTGTA | |
| | | CTAGCCATGAAATACAGATTTCACTGGAAGTGGGGCGGAAACCCT | |
| | | ATATCCAAACAGGTCGTCAGGAATCCCTGCTCCAACTCCAGCCCC | |
| | | TCCGCGGCCCATAGAGGACCTCGCAGCGTACAAGCGGTTGACCC | |
| | | GAAATACAATACCCCAGAGGTCACGTGGCACTCGTGGGACATTAG | |
| | | ACGAGGACTCTTTGGCAAAGCAGGTATTAAAAGAATGCAACAGGA | |
| | | ATCAGATGCTCTTTACATTCCTCCAGGACCAATCAAGAGACCTCGC | |
| | | AGGGACACCAACGCCCAAGACCCAGAAGAGCAAAACGAAAGCTC | |
| | | AGGTTTCAGGGTCCAGCAGCGACTCCCGTGGGTCCACTCCAGCC | |
| | | AAGAGACGCAAAGCTCCCAAGAAGAGACGGAGGCGCAGGGGTCG | |
| | | GTACAAGACCAACTACTCCTCCAGCTCCGAGAGCAGCGAGTTCTC | |
| | | CGACTCCAGCTCCAGCAACTCGCAACCCAAGTCCTCAAAGTCCAA | |
| | | GCAGGGCACAGCCTACACCCCCTATTATCTTCCCAAGCATAA | |
| CAF05739.1 | AJ620225.1 | ATGCGTTTTCGCAGGGTTGCCCAGAAAAGGAAAGTGCTTTTGCAA | 135 |
| | | ACTGTGCCAGCTGCAAAGAAGGCTAGGCGGCTTCTAGGTATGTGG | |
| | | CAGCCCCCCACGCACAATGTCCCGGGCATCGAGAGAAACTGGTA | |
| | | CGAGAGCTGTTTTAGATCCCACGCTGCTGTTTGTGGCTGTGGCGA | |
| | | TTTTGTTGGCCATCTTAATCATCTGGCAACTACTCTGGGTCGTCCT | |
| | | CCGCGTCCTGGGCCCCCAGGCGGACCCCGCACGCCGCAAATAAG | |
| | | AAACCTGCCAGCGCTCCCGGCGCCCCAGGGCGAGCCCGGTGACA | |
| | | GAGCGTCATGGCGTGGGGCTTCTGGGGCCGACGCCGCCGGTGG | |
| | | AGACGATGGAGAGCGCGGCGCAGACGGTGGGGACCCCGCAGAC | |
| | | GTAGGAGACGACGCCCTCCTC | |
| CAF05740.1 | AJ620225.1 | ATGGCGTGGGGCTTCTGGGGCCGACGCCGCCGGTGGAGACGAT | 136 |
| | | GGAGAGCGCGGCGCAGACGGTGGGGACCCCGCAGACGTAGGAG | |
| | | ACGACGCCCTCCTCGCCGCTTTCGAGCTCGTCGAAGAGTAAGGAG | |
| | | GCGCGGGGGGAGGTGGCGCAGACGCTACAGAAAATGGCGACGG | |
| | | GGCAGACGCAGACGGACTCACAGAAAAAAGATAGTCATAAAACAG | |
| | | TGGCAACCAAACTTTATAAGACGCTGCTACATCATAGGGTACTTAC | |
| | | CACTTATATTCTGCGGCGAAAATACAACCGCCCAGAACTTTGCCAC | |
| | | TCACTCGGACGACATGATAAGCAAAGGACCGTACGGGGGGGGCA | |
| | | TGACTACCACCAAATTCACTCTGAGAATACTGTACGACGAGTTTAC | |
| | | CAGGTTTATGAACTTTTGGACTGTCAGTAACGAAGACCTAGACCTG | |
| | | TGTAGATACGTGGGCTGCAAACTAATATTTTTTAAACACCCCACGG | |
| | | TGGACTTTATAGTACAGATAAACACTCAGCCTCCTTTCTTAGACAC | |
| | | GCACCTCACCGCGGCCAGCATACACCCGGGCATCATGATGCTCA | |
| | | GCAAGAGACACATACTAATACCCTCTCTAAAGACCCGGCCCAGCA | |
| | | GAAAACACAGGGTGGTCGTCAGGGTGGGCGCCCCAAGACTTTTTC | |
| | | AGGACAAGTGGTACCCCCAGTCAGACCTGTGTGACACAGTTCTGC | |
| | | TTTCCATATTCGCAACCGCCTGCGACTTGCAATATCCGTTCGGCTC | |
| | | ACCACTAACTGACAACCCTTGCGTCAACTTCCAGATCCTGGGGCC | |
| | | CCAGTACAAAAAACACCTTAGTATTAGCTCCACTATGGATGACACT | |
| | | AACAAAGCACATTATGAAGAAAACTTATTTAATAAAACTGAACTATA | |
| | | CAACACCTTTCAAACCATAGCTCAGCTTAGAGACACAGGACAAACT | |
| | | GCAAACGCTAGTCCTAATTGGAATGAGGTCCAGAATACAGCAGCA | |
| | | CTTCAGTTATCAGGTGCAAATGCCACTAGCAGCAAAGACACTTGGT | |
| | | ATAAAGGTAATACATACACGAAAGACATATCAAAGTTAGCAGAAAA | |
| | | AACCAGACAAAGATTTAAAGCTGCAACAATAGCAGCACTACCAAAC | |
| | | TACCCCACAATAATGTCCACAGACCTATATGAATACCACTCAGGCA | |
| | | TATACTCCAGCATATATTTATCAGCTGGCAGGAGCTACTTTGAAAC | |
| | | CACCGGGGCCTACTCTGACATTATATACAACCCTTTCACAGACAAA | |
| | | GGCACAGGCAACATAATCTGGATAGACTACCTCACAAAAGAAGAC | |
| | | ACCATTTTTGTAAAAAACAAAAGCAAATGCGAGATAATGGACATGC | |
| | | CCCTGTGGGCGGCCTGCACAGGATACACAGAGTTTTGTGCAAAGT | |
| | | ATACAGGCGACTCTGCCATTATCTACAATGCAAGAATACTCATAAG | |
| | | ATGCCCATACACTGAGCCCATGTTAATAGACCACTCAGACCCAAAC | |
| | | AAAGGCTTCGTTCCCTACTCATTTAACTTTGGCAACGGAAAGATGC | |
| | | CCGGAGGCAGCTCCAACGTACCGATAAGAATGAGAGCCAAATGGT | |
| | | ACGTGAACATATTCCACCAAAAGGAGGTTCTAGAGGCTATAGTACA | |
| | | AAGCGGACCGTTCGGGTACAAGGGCGACATAAAATCAGCTGTACT | |
| | | AGCCATGAAATACAGATTTCACTGGAAGTGGGGCGGAAACCCTAT | |
| | | ATCCAAACAGGTCGTCAGGAATCCCTGCTCCAACTCCAGCTCATC | |
| | | CGCGGCCCATAGAGGACCTCGCAGCGTACAAGCGGTTGACCCGA | |
| | | AATACAATACCTCAGAGGTCACGTGGCACTCGTGGGACATTAGAC | |
| | | GAGGACTCTTTGACAAAGCAGGTATTAAAAGAATGCAACAGGAATC | |
| | | AGATGCTCTTTACATTCCTCCAGGACCAATCAAGAGACCTCGCAG | |
| | | GGACACCAACGCCCAAGACCCAGAAGAGCAAAACGAAAGCTCAG | |
| | | GTTTCAGAGTCCAGCAGCGACTCCCGTGGGTCCACTCCAGCCAAG | |
| | | AGACGCAAAGCTTCCAAGAAGAGACGGAGGCGCAGGGGTCGGTA | |
| | | CAAGACCAACTACTCCTCCAGCTCCGAGAGCAGCGAGTTCTCCGA | |
| | | CTCCAGCACCAGCAACTCGCAACCCAAGTCCTCAAAGTCCAAGCA | |
| | | GGGCACAGCCTACACCCCCTATTATCTTCCCAAGCATAA | |
| CAF05741.1 | AJ620226.1 | ATGCGTTTTTCCAGGATTGCTCGCTCGAAAAGGAAAGTGCCACTG | 137 |
| | | CCAACACTGCCAATACCACCGCCGCCTGGGACTATGAGCTGGCG | |
| | | CCCTCCGGTCCACAATGCCGCTGGAATCGACCGTAACTGGTTCGA | |
| | | ATCCTGTTTCAGATCTCACGCTAGCAGTTGCGGCTGTGGAAATTTT | |
| | | ATTGGCCATCTTAATACTCTCGCTACTCGCTACGGCTTTACTCCTG | |
| | | GGCCCGCGCCGCCGCCTGGTGGTCCAGGCCCGCGGCCGCCAGT | |
| | | ACCAGTGAGGCCCCGGCACCTGGCCGGAGACGGTAACCAGCCCA | |
| | | GGGCCCTGCCATGGCGTGGGGATGGTGGAGACGCAGACGCTGG | |
| | | CCCACCTACAGAAGGTGGCGGCGCTGGAGACGCCGCAGGAGAGT | |
| | | ACCGCGACGAAGACCTCGAAGAGCTGTTCGCCGCTATGGAAAGA | |
| | | GACGAGTAA | |
| CAF05742.1 | AJ620226.1 | ATGGTGGAGACGCAGACGCTGGCCCACCTACAGAAGGTGGCGGC | 138 |
| | | GCTGGAGACGCCGCAGGAGAGTACCGCGACGAAGACCTCGAAGA | |
| | | GCTGTTCGCCGCTATGGAAAGAGACGAGTAAGGAGGCGCCGGTG | |
| | | GGGAGGCGGCGGTACCGAAGGGGCTACAGACGCAGGGTCGCGG | |
| | | TCAGACTGAGACGCAGACGCAGACGGGGACGTAAGAGACTTGTA | |
| | | CTTACTCAGTGGCAGCCCCAGACCCGTAGAAAGTGCACCATCACC | |
| | | GGGTACCTCCCGGTGGTATGGTGCGGCTACCTCCGGGCCGCCAA | |
| | | AAACTATGCCTACCACTCTGACGACTCCACAAAGCAGCCGGACCC | |
| | | CTTTGGGGGCGCGCTGAGCACTACCTCCTTTAACCTTAAGGTGCT | |
| | | GTACGACCAGCACCAGAGAGGACTCAACAGGTGGTCTTTCCCTAA | |
| | | CGACCAACTGGACCTAGCTCGCTACAGGGGGTGCACACTTACGTT | |
| | | CTACAGACAGAAAGCCACTGACTTTATAGCTATTTATGACATCTCC | |
| | | GCCCCATACAAACTAGACAAGTACAGCTCTCCCAGCTATCACCCC | |
| | | GGCAACATGATAATGCAGAAAAAGAAAATTCTCATTCCCAGCTACG | |
| | | ACACTAACCCCAGGGGCCGCCAAAAAATAGTAGTTAAAATCCCCC | |
| | | CCCCTAAACTGTTCGTGGATAAGTGGTATGCACAGGAGGACCTGT | |
| | | GCGACGTTAATCTTGTGACACTTGCGGTCAGCGCAGCTTCCTTTAC | |
| | | ACATCCGTTCGGCTCACCACTAACGAACAACCCTTGTGTAACCTTC | |
| | | CAGGTACTTGACTCAATATACTATTCCGTAATAGGTTACGGTTCCT | |
| | | CAGATCAGAAAAAAAAACAAGTACTTGAAACTCTCTATAACGAAAA | |
| | | TGCATACTGGGCCTCACACTTAACTCCTTACTTTACCACTGGCCTT | |
| | | AAAATTCCATATCCAGATACTAAGAATCCCAGCACTACTGCATCTG | |
| | | TTACTCCAAACACGCTATTTACAACAGGTAGCTACGACTCAAACAT | |
| | | TAAAATAGCAGGAGACAGCAACTACAACTGGTACCCCTACAACCTT | |
| | | AAAAACAAAATAGACAAACTTCATAAAATTAGAGAACAATACTTTAA | |
| | | ATGGGAAACAGATGAAGGCCCCCAAGCCACATCTGATTATGGCAA | |
| | | ACACCACACTTGGACTAAACCCACCGATGACTACTACGAATACCAC | |
| | | CTAGGTTTATTTAGTCCCATATTCATAGGACCCACCAGAAGCAACA | |
| | | AACTATTTGCAACCGCCTACCAGGACGTTACTTACAACCCCCTAAA | |
| | | CGACAAGGCGGTGGGAAACAAGTTCTGGTTTCAGTACAACACAAA | |
| | | AGCAGACACCCAGGTGGCCAAACAAGGCTGCTACTGCATGCTAGA | |
| | | AGACATTCCCCTCTGGGCCGCCATGTATGGCTACTCTGACTTTATA | |
| | | GAGACCGAGCTAGGCCCCTTCCAAGACGCAGAGACGGTGGGCTA | |
| | | TATCTGTGTAATATGCCCCTACACCGAGCCCCCCATGTACAACAAA | |
| | | CACAATCCCATGCAGGGTTACGTGTTTTATGACTCGTTTTTTGGCA | |
| | | ATGGCAAGTGGATAGACGGACGGGGACACATAGAGCCTTACTGG | |
| | | CTCTGCCGCTGGAGGCCAGAAATGCTTTTCCAGCAGCAGGTTATG | |
| | | AGAGACATTGTGCAGACCGGGCCCTGGAGCTATAAAGACGAAAGC | |
| | | AAAAACTGTGTTCTGCCCATGAAGTATAAGTTCAGATTCACATGGG | |
| | | GCGGCAATATGGTCTCCCAACAGACAATCAGAAACCCCTGCAAGA | |
| | | CTGACGGACAACTTGCCCCCTCCGGTAGACAGCCTAGAGAAGTAC | |
| | | AAGTTGTTGACCCACTCACCATGGGTCCCCGCTGGGTTTTCCACT | |
| | | CCTGGGACTGGAGACGTGGCTACCTTAGTGAGACAGCTCTCAGAC | |
| | | GCCTGCGAGAAAAACCACTCGACTATGAGGCGTATATGCAAAAAC | |
| | | CAAAAAGACCTAGACTGTTCCCTGTTACAGAGGGCGACGACCAGT | |
| | | CCCCGCAGCAAGGCGACGACTGGTGTTCAGAGGAAGAAAAGTCG | |
| | | CCGCAGTTTACCGAAGAGACGACGCAGACGCTACAGCTCCAGCTC | |
| | | CAGCGCCAGCTCCGGCGACAGCAGCGACTCGGAGAGCAGCTCCA | |
| | | ACTCCTACAACACCACCTCCTCAAAACGCAAGCGGGCCTCCAAAT | |
| | | AAACCCATTATTATTGGTCCGGCAGTAA | |
| CAF05743.1 | AJ620227.1 | ATGCACTTTTCTCGAATAAGCAGAAAGAAAGGGAAAGTGCTACTGC | 139 |
| | | TTTGCGTGCCAGCAGTTAAGAAAAAACCAACTGCTATGAGCTTCTG | |
| | | GAGACCTCCGATGCACAATGTCACGGGGATCCAACGCCTGTGGTA | |
| | | CGAGTCCTTTCACCGTGGCCATGCTGCTTTTTGTGGTTGTGGGGA | |
| | | TCCTGTACTTCACATTACTGCACTTGCTGAGACATATGGCCATCCA | |
| | | ACAGGCCCGAGACCTTCTGGGTCATCGGGAATAGATCCCACTCCG | |
| | | CCCATCCGTAGAGCCAGGCCTGCCCCGGCCGCTCCGGAACCCCC | |
| | | ACAGGTTGACTCCAGACCGGCCCTGCCATGGCATGGAGATGGTG | |
| | | GAAGCGACGGAGGCGCTGGTGGCTCCGCAAGCGGTGGACCCGT | |
| | | GGCAGACTTCGCAGACGATGGCCTAGACCAGCTCGTCGCCGCCC | |
| | | TAGACGACGAAGAGTAA | |
| CAF05744.1 | AJ620227.1 | ATGGCATGGAGATGGTGGAAGCGACGGAGGCGCTGGTGGCTCCG | 140 |
| | | CAAGCGGTGGACCCGTGGCAGACTTCGCAGACGATGGCCTAGAC | |
| | | CAGCTCGTCGCCGCCCTAGACGACGAAGAGTAAGGAGACGCAGA | |
| | | CGGTGGAGGAGGGGGCGACCCAGACGCAGGCTGTACCGACGCT | |
| | | ACAGACGCAAAAAACGTAGGAGACGAAAGCCCAAAATAATCTTAAA | |
| | | ACAATGGCAGCCAGACATTGTAAAGAGGTGCTACATAGTGGGCTA | |
| | | CATTCCTGCCATAATATGTGGGGCGGGCACCTGGTCTCACAACTA | |
| | | CACCAGCCACCTCCTAGACATTATCCCCAAAGGACCCTTTGGAGG | |
| | | AGGGCACAGCACTATGAGGTTCTCCCTAAAAGTACTCTTTGAAGAA | |
| | | CACCTCAGACACTTAAACTTTTGGACAAAAAGCAACCAGGACCTAG | |
| | | AACTCATAAGATACTTTAGATGCTCCTTTAAATTCTATAGAGACCAA | |
| | | GACACAGACTACATAGTACACTACAGCAGAAAAACTCCCCTGGGA | |
| | | GGAAACAGACTAACAGCGCCTAGCCTACACCCCGGTGTACAGATG | |
| | | CTTAGCAAAAACAAAATATTAGTACCTAGCTATGCTACAAAACCCAA | |
| | | GGGTGGGAGCTATGTAAAAGTAACCATAGCACCCCCCACACTACT | |
| | | AACTGACAAGTGGTACTTTAGCAAAGACATTTGTGACACAACCTTG | |
| | | GTTAACTTAGACGTTGTACTCTGCAACTTGCGGTTTCCGTTCTGCT | |
| | | CACCACAAACTGACAACCCTTGCATCACATTCCAAGTTCTGCATTC | |
| | | CTTGTACAACGACTTCCTCTCCATAGTAGATACTGAAAATTACAAAA | |
| | | CCACTTTTGTTACTACACTGACAACAAAATTAGGTACAACATGGGG | |
| | | TTCAAGACTAAATACATTTAGAACAGAAGGCTGCTACTCACACCCT | |
| | | AAACTACCTAAAAAACAACTAATTGCTGCAAATGACACAACATACTT | |
| | | TACATCACCTGATGGGCTCTGGGGAGACGCAGTTTTCGACATCTC | |
| | | AAAACCTCAAGTAATTACCGAAAATATGGAGTCTTACGCTAACTCA | |
| | | GCCAAACAAAGAGGGGTGAACGGAGACCCCGCTTTTTGCCACCTA | |
| | | ACAGGAATATACTCACCTCCCTGGCTAACACCAGGCAGAATATCC | |
| | | CCTGAAACCCCAGGACTTTACACAGACGTGACTTACAACCCATAC | |
| | | GCTGACAAAGGAGTAGGCAACAGAATATGGGTCGACTACTGCAGT | |
| | | AAAAAAGGCAACAAATATGACAATACAAGTAAATGCCTTTTAGAAG | |
| | | ACATGCCACTATGGATGGTATGCTTTGGATACGTAGACTGGGTAAA | |
| | | AAAAGAGACTGGCAACTGGGGTATTCCACTATGGGCTAGAGTACT | |
| | | TATCAGAAGCCCATACGCTGTTCCAAAACTGTATAATGAAGCAGAC | |
| | | CCAAACTATGGATGGGTACCTATTTCTTACTACTTTGGAGAAGGCA | |
| | | AAATGCCAAACGGAGACATGTACGTACCATTTAAAATAAGAATGAA | |
| | | ATGGTACCCTTCAATGTGGAACCAAGAGCCAGTGTTAAATGACTTA | |
| | | GCAAAGAGCGGACCGTTTGCATACAAAAACACAAAAACAAGCGTG | |
| | | ACTGTGACTGCCAAATATAAATTTACATTTAACTTCGGGGGCAACC | |
| | | CCGTACCCTCACAGATTGTACAAGATCCCTGCACACAGTCCACCTA | |
| | | CGACATCCCCGGCACCGGTAACCTGCCTCGCAGAACACAAGTCAT | |
| | | TGACCCGAAATTCCTCGGTCCCCACTATTCCTTCCACCGGTGGGA | |
| | | CTTCAGGCGTGGCCTCTTTGGCTCACAAGCTATTAAGAGAGTGTC | |
| | | AGAACAACCAACAACTTCTGAGTTTTTATTCTCAGGCCCAAAGAGA | |
| | | CCCAGAATCGATCAAGGTCCTTACATCCCGCCAGAAAAAGACTCA | |
| | | GGTTCACTCCAAAGAGAATCGAGACCGTGGAGCAGCTCGGAGAC | |
| | | CGAGGCAGAGACAGAAGCCCCCTCGGAAGAAGAGCCGGAGAACC | |
| | | AAGAAGAACAAGTACTCCAGTTGCAGCTCAGACAGCAGCTTCGAG | |
| | | AACAGCGAAAACTCAGACAGGGAATCCAGTGCCTATTCGAGCAAC | |
| | | TGATAACAACCCAACAGGGGGTCCACAAAAACCCATTGTTAGAGTAG | |
| CAF05745.1 | AJ620228.1 | ATGCACTTTTCTCGAATAAGCAGAAAGAAAAGGAAAGTGCTACTGC | 141 |
| | | TTTGCGTGCCAGCAGTTAAGAAAAAACCAACTGCTATGAGCTTCTG | |
| | | GAGACCTCCGATGCACAATGTCACGGGGATCCAACGCCTGTGGTA | |
| | | CGAGTCCCTTCACCGTGGCCATGCTGCTTTTTGTGGTTGTGGGGA | |
| | | TCCTGTACTTCACATTACTGCACTTGCTGAGACATATGGCCATCCA | |
| | | ACAGGCCCGAGACCTTCTGGGTCATCGGGAATAGATCCCACTCCG | |
| | | CCCATCCGTAGAGCCAGGCCTGCCCCGGCCGCTCCGGAACCCCC | |
| | | ACAGGTTGACTCCAGACCGGCCCTGCCATGGCATGGAGATGGTG | |
| | | GGAGCGACGGAGGCGCTGGTGGCTCCGCAAGCGGTGGACCCGT | |
| | | GGCAGACTTCGCAGACGATGGCCTAGACCAGCTCGTCGCCGCCC | |
| | | TAGACGACGAAGAGTAA | |
| CAF05746.1 | AJ620228.1 | ATGGCATGGAGATGGTGGGAGCGACGGAGGCGCTGGTGGCTCCG | 142 |
| | | CAAGCGGTGGACCCGTGGCAGACTTCGCAGACGATGGCCTAGAC | |
| | | CAGCTCGTCGCCGCCCTAGACGACGAAGAGTAAGGAGACGCAGA | |
| | | CGGTGGAGGAGGGGGCGACCCAGACGCAGACTGTACCGACGCTA | |
| | | CAGACGCAAAAAACGTAGGAGACGAAAGCCCAAAATAATCTTAAAA | |
| | | CAATGGCAGCCAGACATTGTAAAGAGGTGCTACATAGTGGGCTAC | |
| | | ATTCCTGCCATAATATGTGGGGCGGGCACCTGGTCTCACAACTAC | |
| | | ACCAGCCACCTCCTAGACATTATCCCCAAAGGACCCTTTGGAGGA | |
| | | GGGCACAGCACTATGAGGTTCTCCCTAAAAGTACTCTTTGAAGAAC | |
| | | ACCTCAGACACTTAAACTTTTGGACAAAAAGCAACCAGGACCTAGA | |
| | | ACTCATAAGATACTTTAGATGCTCCTTTAAATTCTATAGAGACCAAG | |
| | | ACACAGACTACATAGTACACTACAGCAGAAAAACTCCCCTGGGAG | |
| | | GAAACAGACTAACAGCGCCTAGCCTACACCCCGGTGTACAGATGC | |
| | | TTAGCAAAAACAAAATATTAGTACCTAGCTATGCTACAAAACCCAA | |
| | | GGGTGGGAGCTATGTAAAAGTAACCATAGCACCCCCCACACTACT | |
| | | AACTGACAAGTGGTACTTTAGCAAAGACATTTGTGACACAACCTTG | |
| | | GTTAACTTAGACGTTGTACTCTGCAACTTGCGGTTTCCGTTCTGCT | |
| | | CACCACAAACTGACAACCCTTGCATCACATTCCAAGTTCTGCATTC | |
| | | CTTGTACAACGACTTCCTCTCTATAGTAGATACTGAAAATTACAAAA | |
| | | CCACTTTTGTTACTACACTGACAACAAAATTAGGTACAACATGGGG | |
| | | TTCAAGACTAAATACATTTAGAACAGAAGGCTGCTACTCACACCCT | |
| | | AAACTACCTAAAAAACAACTAATTGCTGCAAATGACACAACATACTT | |
| | | TACATCACCTGATGGGCTCTGGGGAGACGCAGTTTTCGACATCTC | |
| | | AAAACCTCAAGTAATTACCGAAAATATGGAGTCTTACGCTAACTCA | |
| | | GCCAAACAAAGAGGGGTGAACGGAGACCCCGCTTTTTGCCACCTA | |
| | | ACAGGAATATACTCACCTCCCTGGCTAACACCAGGCAGAATATCC | |
| | | CCTGAAACCCCAGGACTTTACACAGACGTGACTTACAACCCATAC | |
| | | GCTGACAAAGGAGTAGGCAACAGAATATGGGTCGACTACTGCAGT | |
| | | AAAAAAGGCAACAAATATGACAATACAAGTAAATGCCTTTTAGAAG | |
| | | ACATGCCACTATGGATGGTATGCTTTGGATACGTAGACTGGGTAAA | |
| | | AAAAGAGACTGGCAANTGGGGTATTCCACTATGGGCTAGAGTACT | |
| | | TATCAGAAGCCCATACACTGTTCCAAAACTGTATAATGAAGCAGAC | |
| | | CCAAACTATGGATGGGTACCTATTTCTTACTACTTTGGAGAAGGCA | |
| | | AAATGCCAAACGGAGACATGTACGTACCATTTAAAATGAGAATGAA | |
| | | ATGGCACCCTTCAATGTGGAACCAAGAGCCAGTGTTAAATGACTTA | |
| | | GCAAAGAGCGGACCGTTTGCATACAAAAACACAAAAACAAGCGTG | |
| | | ACTGTGACTGCCAAATATAAATTTACATTTAACTTCGGGGGCAACC | |
| | | CCGTACCCTCACAGATTGTACAAGGTCCCTGCACACAGTCCACCT | |
| | | ACGACATCCCCGGCACCGGTAACCTGCCTCGCAGAATACAGGTCA | |
| | | TTGACCCGAAATTCCTCGGTCCCCACTATTCCTTCCACCGGTGGG | |
| | | ACTTCAGGCGTGGCCTCTTTGGCTCACAAGCTATTAAGAGAGTGT | |
| | | CAGAACAACCAACAACTTCTGAGTTTTTATTCTCAGGCCCAAAGAG | |
| | | ACCCAGAATCGATCAAGGTCCTTACATCCCGCCAGAAAAAGACTC | |
| | | AGGTTCACTCCAAAGAGAATCGAGACCGTGGAGCAGCTCGGAGAC | |
| | | CGAGGCAGAGACAGAAGCCCCCTCGGAAGAAGAGCCGGAGAACC | |
| | | AAGAAGAACAAGTACTCCAGTTGCAGCTCAGACAGCAGCTTCGAG | |
| | | AACAGCGAAAACTCAGACAGGGAATCCAGTGCCTATTCGAGCAAC | |
| | | TGATAACAACCCAACAGGGGGTCCACAAAAACCCATTGTTAGAGTAG | |
| CAF05747.1 | AJ620229.1 | ATGCACTTTTCTCGAATAAGCAGAAAGAAAAGGAAAGTGCTACTGC | 143 |
| | | TTTGCGTGCCAGCAGTTAAGAAAAAACCAACTGCTATGAGCTTCTG | |
| | | GAGACCTCCGATGCACAATGTCACGGGGATCCAACGCCTGTGGTA | |
| | | CGAGTCCCTTCACCGTGGCCATGCTGCTTTTTGTGGTTGTGGGGA | |
| | | TCCTGTACTTCACATTACCGCACTTGCTGAGACATATGGCCATCCA | |
| | | ACAGGCCCGAGACCTTCTGGGTCATCGGGAATAGATCCCACTCCG | |
| | | CCCATCCGTAGAGCCAGGCCTGCCCCGGCCGCTCCGGAACCCCC | |
| | | ACAGGTTGACTCCAGACCGGCCCTGCCATGGCATGGAGATGGTG | |
| | | GAAGCGACGGAGGCGCTGGTGGCTCCGCAAGCGGTGGACCCGT | |
| | | GGCAGACTTCGCAGACGATGGCCTAGACCAGCTCGTCGCCGCCC | |
| | | TAGACGACGAAGAGTAA | |
| CAF05748.1 | AJ620229.1 | ATGGCATGGAGATGGTGGAAGCGACGGAGGCGCTGGTGGCTCCG | 144 |
| | | CAAGCGGTGGACCCGTGGCAGACTTCGCAGACGATGGCCTAGAC | |
| | | CAGCTCGTCGCCGCCCTAGACGACGAAGAGTAAGGAGACGCAGA | |
| | | CGGTGGAGGAGGGGGCGACCCAGACGCAGACTGTACCGACGCTA | |
| | | CAGACGCAAAAAACGTAGGAGACGAAAGCCCAAAATAATCTTAAAA | |
| | | CAATGGCAGCCAGACATTGTAAAGAGGTGCTACATAGTGGGCTAC | |
| | | ATTCCTGCCATAATATGTGGGGCGGGCACCTGGTCTCACAACTAC | |
| | | ACCAGCCACCTCCTAGACATTATCCCCAAAGGACTCTTTGGAGGA | |
| | | GGGCACAGCACTATGAGGTTCTCCCTAAAAGTACTCTTTGAAGAAC | |
| | | ACCTCAGACACTTAAACTTTTGGACAAAAAGCAACCAGGACCTAGA | |
| | | ACTCATAAGATACTTTAGATGCTCCTTTAAATTCTATAGAGACCAAG | |
| | | ACACAGACTACATAGTACACTACAGCAGAAAAACTCCCCTGGGAG | |
| | | GAAACAGACTAACAGCGCCTAGCCTACACCCCGGTGTACAGTTGC | |
| | | TTAGCAAAAACAAAATATTAGTACCTAGCTATGCTACAAAACCCAA | |
| | | GGGTGGGAGCTATGTAAAAGTAACCATAGCACCCCCCACACTACT | |
| | | AACTGACAAGTGGTACTTTAGCAAAGACATTTGTGACACAACCTTG | |
| | | GTTAACTTAGACGTTGTACTCTGCAACTTGCGGTTTCCGTTCTGCT | |
| | | CACCACAAACTGACAACCCTTGCATCACATTCCAAGTTCTGCATTC | |
| | | CTTGTACAACGACTTCCTCTCTATAGTAGATACTGAAAATTACAAAA | |
| | | CCACTTTTGTTACTACACTGACAACAAAATTAGGTACAACATGGGG | |
| | | TTCAAGACTAAATACATTTAGAACAGAAGGCTGCTACTCACACCCT | |
| | | AAACTACCTAAAAAACAACTAATTGCTGCAAATGACACAACATACTT | |
| | | TACATCACCTGATGGGCTCTGGGGAGACGCAGTTTTCAACATCTC | |
| | | AAAACCTCAAGTAATTACCGAAAATATGGAGTCTTACGCTAACTCA | |
| | | GCCAAACAAAGAGGGGTGAACGGAGACCCCGCTTTTTGCCACCTA | |
| | | ACAGGAATATACTCACCTCCCTGGCTAACACCAGGCAGAATATCC | |
| | | CCTGAAACCCCAGGACTTTACACAGACGTGACTTACAACCCATAC | |
| | | GCTGACAAAGGAGTAGGCAACAGAATATGGGTCGACTACTGCAGT | |
| | | AAAAAAGGCAACAAATATGACAATACAAGTAAATGCCTTTTAGAAG | |
| | | ACATGCCACTATGGATGGTATGCTTTGGATACGTAGACTGGGTAAA | |
| | | AAAAGAGACTGGCAACTGGGGTATTCCACTATGGGCTAGAGTACT | |
| | | TATCAGAAGCCCATACACTGTTCCAAAACTGTATAATGAAGCAGAC | |
| | | CCAAACTATGGATGGGTACCTATTTCTTACTACTTTGGAGAAGGCA | |
| | | AAATGCCAAACGGAGACATGTACGTACCATTTAAAATAAGAATGAA | |
| | | ATGGCACCCTTCAATGTGGAACCAAGAGCCAGTGTTAAATGACTTA | |
| | | GCAAAGAGCGGACCGTTTGCATACAAAAACACAAAAACAAGCGTG | |
| | | ACTGTGACTGCCAAATATAAATTTACATTTAACTTCGGGGGCAACC | |
| | | CCGTACCCTCACAGATTGTACAAGATCCCTGCACACAGTCCACCTA | |
| | | CGACATCCCCGGCACCGGTAACCTGCCTCGCAGAATACAAGTCAT | |
| | | TGACCCGAAATTCCTCGGTCCCCACTATTCCTTCCACCGGTGGGA | |
| | | CTTCAGGCGTGGCCTCTTTGGCTCACAAGCTATTAAGAGAGTGTC | |
| | | AGAACAACCAACAACTTCTGAGTTTTTATTCTCAGGCCCAAAGAGA | |
| | | CCCAGAATCGATCAAGGTCCTTACATCCCGCCAGAAAAAGACTCA | |
| | | GGTTCACTCCAAAGAGAATCGAGACCGTGGAGCAGCTCGGAGAC | |
| | | CGAGGCAGAGACAGAAGCCCCCTCGGAAGAAGAGCCGGAGAACC | |
| | | AAGAAGAACAAGTACTCCAGTTGCAGCTCAGACAGCAGCTTCGAG | |
| | | AACAGCGAAAACTCAGACAGGGAATCCAGTGCCTATTCGAGCAAC | |
| | | TGATAACAACCCAACAGGGGGTCCACAAAAACCCATTGTTAGAGTAG | |
| CAF05780.1 | AJ620230.1 | ATGCACTTTTCTCGAATAAGCAGAAAGAAAAGGAAAGTGCTACTGC | 145 |
| | | TTTGCGTGCCAGCAGCTAAGAAAAAACCAACTGCTATGAGCTTCTG | |
| | | GAAACCTCCGGTACACAATGTCACGGGGATCCAACGCATGTGGTA | |
| | | TGAGTCCTTTCACCGTGGCCACGCTTCTTTTTGTGGTTGTGGGAAT | |
| | | CCTATACTTCACATTACTGCACTTGCTGAAACATATGGCCATCCAA | |
| | | CAGGCCCGAGACCTTCTGGGCCACCGGGAGTAGACCCCAACCCC | |
| | | CACATCCGTAGAGCCAGGCCTGCCCCGGCCGCTCCGGGGCCCTC | |
| | | ACAGGTTGATTCGAGACCAGCCCTGACATGGCATGGGGATGGTG | |
| | | GAAGCGACGGAGGCGCTGGTGGTTCCGGAAGCGGTGGACCCGT | |
| | | GGCAGACTTCGCAGACGATGGCCTCGATCAGCTCGTCGCCGCCC | |
| | | TAGACGACGAAGAGTAA | |
| CAF05781.1 | AJ620230.1 | ATGGCATGGGGATGGTGGAAGCGACGGAGGCGCTGGTGGTTCCG | 146 |
| | | GAAGCGGTGGACCCGTGGCAGACTTCGCAGACGATGGCCTCGAT | |
| | | CAGCTCGTCGCCGCCCTAGACGACGAAGAGTAAGGAGGCGCAGA | |
| | | CGGTGGAGGAGGGGGAGACGAAAAACAGGGACTTACAGACGCAG | |
| | | GAGACGCTTTAGACGCAGGAGACGAAAAGCAAAACTTATAATAAAA | |
| | | CTGTGGCAACCTGCAGTAATTAAAAGATGCAGAATAAAGGGATACA | |
| | | TACCACTGATTATAAGTGGGAACGGTACCTTTGCCACAAACTTTAC | |
| | | CAGTCACATAAATGACAGAATAATGAAAGGCCCCTTCGGGGGAGG | |
| | | ACACAGCACTATGAGGTTCAGCCTCTACATTTTGTTTGAGGAGCAC | |
| | | CTCAGACACATGAACTTCTAG | |
| CAF05782.1 | AJ620230.1 | ATGGCAGTTGAGGCTGACTTGCGGTTTCCGTTCTGCTCACCACAA | 147 |
| | | ACTGACAACACTTGCATCAGCTTCCAGGTCCTTAGTTCCGTTTACA | |
| | | ACAACTACCTCAGTATTAATACCTTTAATAATGACAACTCAGACTCA | |
| | | AAGTTAAAAGAATTTTTAAATAAAGCATTTCCGACAACAGGCACAAA | |
| | | AGGAACAAGTTTAAATGCACTAAATACATTTAGAACAGAAGGATGC | |
| | | ATAAGTCACCCACAACTAAAAAAACCAAACCCACAAATAAACAAAC | |
| | | CATTAGAGTCACAATACTTTGCACCTTTAGATGCCCTCTGGGGAGA | |
| | | CCCCATATACTATAATGATCTAAATGAAAACAAAAGTTTGAACGATA | |
| | | TCATTGAGAAAATACTAATAAAAAACATGATTACATACCATGCAAAA | |
| | | CTAAGAGAATTTCCAAATTCATACCAAGGAAACAAGGCCTTTTGCC | |
| | | ACCTAACAGGCATATACAGCCCACCATACCTAAACCAAGGCAGAAT | |
| | | ATCTCCAGAAATATTTGGACTGTACACAGAAATAATTTACAACCCTT | |
| | | ACACAGACAAAGGAACTGGAAACAAAGTATGGATGGACCCACTAA | |
| | | CTAAAGAGAACAACATATATAAAGAAGGACAGAGCAAATGCCTACT | |
| | | GACTGACATGCCCCTATGGACTTTACTTTTTGGATATACAGACTGG | |
| | | TGTAAAAAGGACACTAATAACTGGGACTTACCACTAAACTACAGAC | |
| | | TAGTACTAATATGCCCTTATACCTTTCCAAAATTGTACAATGAAAAG | |
| | | GTAAAAGACTATGGGTACATCCCGTACTCCTACAAATTCGGAGCG | |
| | | GGTCAGATGCCAGACGGCAGCAACTACATACCCTTTCAGTTTAGA | |
| | | GCAAAGTGGTACCCCACAGTACTACACCAGCAACAGGTAATGGAG | |
| | | GACATAAGCAGGAGCGGGCCCTTTGCACCTAAGGTAGAAAAACCA | |
| | | AGCACTCAGCTGGTAATGAAGTACTGTTTTAACTTTAACTGGGGCG | |
| | | GTAACCCTATCATTGAACAGATTGTTAAAGACCCCAGCTTCCAGCC | |
| | | CACCTATGAAATACCCGGTACCGGTAACATCCCTAGAAGAATACAA | |
| | | GTCATCGACCCGCGGGTCCTGGGACCGCACTACTCGTTCCGGTC | |
| | | ATGGGACATGCGCAGACACACATTTAGCAGAGCAAGTATTAAGAG | |
| | | AGTGTCAGAACAACAAGAAACTTCTGACCTTGTATTCTCAGGCCCA | |
| | | AAAAAGCCTCGGGTCGACATCCCAAAACAAGAAACCCAAGAAGAA | |
| | | AGCTCACATTCACTCCAAAGAGAATCGAGACCGTGGGAGACCGAG | |
| | | GAAGAAAGCGAGACAGAAGCCCTCTCGCAAGAGAGCCAAGAGGT | |
| | | CCCCTTCCAACAGCAGTTGCAGCAGCAGTACCAAGAGCAGCTCAA | |
| | | GCTCAGACAGGGAATCAAAGTCCTCTTCGAGCAGCTCATAAGGAC | |
| | | CCAACAAGGGGTCCATGTAAACCCATGCCTACAGTAG | |
| CAF05749.1 | AJ620231.1 | ATGCACTTTTCTCGAATAAGCAGAAAGAAAAGGAAAGTGCTACTGC | 148 |
| | | TTTGCGTGCCAGCAGCTAAGAAAAAACCAACTGCTATGAGCTTCTG | |
| | | GAAACCTCCGGTACACAATGTCACGGGGATCCAACGCATGTGGTA | |
| | | TGAGTCCTTTCACCGTGGCCACGCTTCTTTTTGTGGTTGTGGGAAT | |
| | | CCTATACTTCACATTACTGCACTTGCTGAAACATATGGCCATCCAA | |
| | | CAGGCCCGAGACCTTCTGGGCCACCGGGAGTAGACCCCAACCCC | |
| | | CACATCCGTAGAGCCAGGCCTGCCCCGGCCGCTCCGGAGCCCTC | |
| | | ACAGGTTGATTCGAGACCAGCCCTGACATGGCATGGGGATGGTG | |
| | | GAAGCGACGGAGGCGCTGGTGGTTCCGGAAGCGGTGGACCCGT | |
| | | GGCAGACTTCGCAGACGATGGCCTCGATCAGCTCGTCGCCGCCC | |
| | | TAGACGACGAAGAGTAA | |
| CAF05750.1 | AJ620231.1 | ATGGCATGGGGATGGTGGAAGCGACGGAGGCGCTGGTGGTTCCG | 149 |
| | | GAAGCGGTGGACCCGTGGCAGACTTCGCAGACGATGGCCTCGAT | |
| | | CAGCTCGTCGCCGCCCTAGACGACGAAGAGTAAGGAGGCGCAGA | |
| | | CGGTGGAGGAGGGGGAGACGAAAAACAAGGACTTACAGACGCAG | |
| | | GAGACGCTTTAGACGCAGGGGACGAAAAGCAAAACTTATAATAAA | |
| | | ACTGTGGCAACCTGCAGTAATTAAAAGATGCAGAATAAAGGGATAC | |
| | | ATACCACTGATTATAAGTGGGAACGGTACCTTTGCCACAAACTTTA | |
| | | CCAGTCACATAAATGACAGAATAATGAAAGGCCCCTTCGGGGGAG | |
| | | GACACAGCACTATGAGGTTCAGCCTCTACATTTTGTTTGAGGAGCA | |
| | | CCTCAGACACATGAACTTCTGGACCAGAAGCAACGATAACCTAGA | |
| | | GCTAACCAGATACTTGGGGGCTTCAGTAAAAATATACAGGCACCC | |
| | | AGACCAAGACTTTATAGTAATATACAACAGAAGAACCCCTCTAGGA | |
| | | GGCAACATCTACACAGCACCCTCTCTACACCCAGGCAATGCCATTT | |
| | | TAGCAAAACACAAAATATTAGTACCAAGTTTACAGACAAGACCAAA | |
| | | GGGTAGAAAAGCAATTAGACTAAGAATAGCACCCCCCACACTCTTT | |
| | | ACAGACAAGTGGTACTTTCAAAAGGACATAGCCGACCTCACCCTTT | |
| | | TCAACATCATGGCAGTTGAGGCTGACTTGCGGTTTCCGTTCTGCTC | |
| | | ACCACAAACTGACAACACTTGCATCAGCTTCCAGGTCCTTAGTTCC | |
| | | GTTTACAACAACTACCTCAGTATTAATACCTTTAATAATGACAACTC | |
| | | AGACTCAAAGTTAAAAGAATTTTTAAATAAAGCATTTCCAACAACAG | |
| | | GCACAAAAGGAACAAGTTTAAATGCACTAAATACATTTAGAACAGA | |
| | | AGGATGCATAAGTCACCCACAACTAAAAAAACCAAACCCACAAATA | |
| | | AACAAACCATTAGAGTCACAATACTTTGCACCTTTAGATGCCCTCT | |
| | | GGGGAGACCCCATATACTATAATGATCTAAATGAAAACAAAAGTTT | |
| | | GAACGATATCATTGAGAAAATACTAATAAAAAACATGATTACATACC | |
| | | ATGCAAAACTAAGAGAATTTCCAAATTCATACCAAGGAAACAAGGC | |
| | | CTTTTGCCACCTAACAGGCATATACAGCCCACCATACCTAAACCAA | |
| | | GGCAGAATATCTCCAGAAATATTTGGACTGTACACAGAAATAATTT | |
| | | ACAACCCTTACACAGACAAAGGAACTGGAAACAAAGTATGGATGG | |
| | | ACCCACTAACTAAAGAGAACAACATATATAAAGAAGGACAGAGCAA | |
| | | ATGCCTACTGACTGACATGCCCCTATGGACTTTACTTTTTGGATAT | |
| | | ACAGACTGGTGTAAAAAGGACACTAATAACTGGGACTTACCACTAA | |
| | | ACTACAGACTAGTACTAATATGCCCTTATACCTTTCCAAAATTGTAC | |
| | | AATGAAAAAGTAAAAGACTATGGGTACATCCCGTACTCCTACAAAT | |
| | | TCGGAGCGGGTCAGATGCCAGACGGCAGCAACTACATACCCTTTC | |
| | | AGTTTAGAGCAAAGTGGTACCCCACAGTACTACACCAGCAACAGG | |
| | | TAATGGAGGACATAAGCAGGAGCGGGCCCTTTGCACCTAAGGTAG | |
| | | AAAAACCAAGCACTCAGCTGGTAATGAAGTACTGTTTTAACTTTAA | |
| | | CTGGGGCGGTAACCCTATCATTGAACAGATTGTTAAAGACCCCAG | |
| | | CTTCCAGCCCACCTATGAAATACCCGGTACCGGTAACATCCCTAG | |
| | | AAGAATACAAGTCATCGACCCGCGGGTCCTGGGACCGCACTACTC | |
| | | GTTCCGGTCATGGGACATGCGCAGACACACATTTAGCAGAGCAAG | |
| | | TATTAAGAGAGTGTCAGAACAACAAGAAACTTCTGACCTTGTATTC | |
| | | TCAGGCCCAAAAAAGCCTCGGGTCGACATCCCAAAACAAGAAACC | |
| | | CAAGAAGAAAGCTCACATTCACTCCAAAGAGAATCGAGACCGTGG | |
| | | GAGACCGAGGAAGAAAGCGAGACAGAAGCCCTCTCGCAAGAGAG | |
| | | CCAAGAGGTCCCCTTCCAACAGCAGTTGCAGCAGCAGTACCAAGA | |
| | | GCAGCTCAAGCTCAGACAGGGAATCAAAGTCCTCTTCGAGCAGCT | |
| | | CATAAGGACCCAACAAGGGGTCCATGTAAACCCATGCCTACGGTAG | |
| CAF05751.1 | AJ620232.1 | ATGCACTTTTCTCGAATAAGCAGAAAGAAAAGGAAAGTGCTACTGC | 150 |
| | | TTTGCGTGCCAGCAGCTAAGAAAAAACCAACTGCTATGAGCTTCTG | |
| | | GAAACCTCCGGTACACAATGTCACGGGGATCCAACGCATGTGGTA | |
| | | TGAGTCCTTTCACCGTGGCCACGCTTCTTTTTGTGGTTGTGGGAAT | |
| | | CCTATACTTCACATTACTGCACTTGCTGAAACATATGGCCATCCAA | |
| | | CAGGCCCGAGACCTTCTGGGCCACCGGGAGTAGACCCCAACCCC | |
| | | CACATCCGTAGAGCCAGGCCTGCCCCGGCCGCTCCGGAGCCCTC | |
| | | ACAGGTTGATTCGAGACCAGCCCTGACGTGGCATGGGGATGGTG | |
| | | GAAGCGACGGAGGCGCTGGTGGTTCCGGAAGCGGTGGACCCGT | |
| | | GGCAGACTTCGCAGACGATGGCCTCGATCAGCTCGTCGCCGCCC | |
| | | TAGACGACGAAGAGTAA | |
| CAF05752.1 | AJ620232.1 | ATGAAAGGCCCCTTCGGGGGAGGACACAGCACTATGAGGTTCAG | 151 |
| | | CCTCTACATTTTGTTTGAGGAGCGCCTCAGACACATGAACTTCTGG | |
| | | ACCAGAAGCAACGATAACCTAGAGCTAACCAGATACTTGGGGGCT | |
| | | TCAGTAAAAATATACAGGCACCCAGACCAAGACTTTATAGTAATAT | |
| | | ACAACAGAAGAACCCCTCTAGGAGGCAACATCTACACAGCACCCT | |
| | | CTCTACACCCAGGCAATGCCATTTTAGCAAAACACAAAATATTAGT | |
| | | ACCAAGTTTACAGACAAGACCAAAGGGTAGAAAAGCAATTAGACTA | |
| | | AGAATAGCACCCCCCACACTCTTTACAGACAAGTGGTACTTTCAAA | |
| | | AGGACATAGCCGACCTCACCCTTTTCAACATCATGGCAGTTGAGG | |
| | | CTGACTTGCGGTTTCCGTTCTGCTCACCACAAACTGGCAACACTTG | |
| | | CATCAGCTTCCAGGTCCTTAATTCCGTTTACAACAACTACCTCAGT | |
| | | ATTAATACCTTTAATAATGACAACTCAGACTCAAAGTTAAAAGAATT | |
| | | TTTAAATAAAGCATTTCCAACAACAGGCACAAAAGGAACAAGTTTA | |
| | | AATGCACTAAATACATTTAGAACAGAAGGATGCATAAGTCACCCAC | |
| | | AACTAAAAAAACCAAACCCACAAATAAACAAACCATTAGATTCACAA | |
| | | TACTTTGCACCTTTAGACGCCCTCTGGGGAGACCCCATATACTATA | |
| | | ATGATCTAAATGAAAAGAAAAGTTTGAAGGATATCATTGAGAACAT | |
| | | ACTAATAAAAAACATGATTACATACCATGAAAAACTAAGAGAGTTTC | |
| | | CAAATTCATACCAAGGAAACAAGGCCTTTTGCCACCTAACAGGCAT | |
| | | ATACAGCCCACCATACCTAAACCAAGGCAGAATATCTCCAGAAATA | |
| | | TTTGGACTGTACACAGAAATAATTTACAACCCTTACACAGACAAAG | |
| | | GAACTGGAAACAAAGTATGGATGGACCCACTAACTAAAGAGAACA | |
| | | ACATATATAAAGAAGGACAGAGCAAATGCCTACTGACTGACATGCC | |
| | | CCTATGGACTTTACTTTTTGGATATACAGACTGGTGTAAAAAGGAC | |
| | | ACTAATAACTGGGACTTACCACTAAACTACAGACTAGTACTAATAT | |
| | | GCCCTTATACCTTTCCAAAATTGTACAATGAAAAGGTAAAAGACTAT | |
| | | GGGTACATCCCGTACTCCTACAAATTCGGAGCGGGTCAGATGCCA | |
| | | GACGGCAGCAACTACATACCCTTTCAGTTTAGAGCAAAGTGGTAC | |
| | | CCCACAGTACTACACCAGCAACAGGTAATGGAGGACATAAGCAGG | |
| | | AGCGGGCCCTTTGCACCTAAGGTAGAAAAACCAGGCACTCAGCTG | |
| | | GTAATGAAGTACTGTTTTAACTTTAACTGGGGCGGTAACCCTATCA | |
| | | TTGAACAGATTGTTAAAGACCCCAGCTTCCAGCCCACCTATGAAAT | |
| | | ACCCGGTACCGGTGACATCCCTAGAAGAATACAAGTCATCGACCC | |
| | | GCGGGTCCTGGGACCGCACTACTCGTTCCGGTCATGGGACACGC | |
| | | GCAGACACACATTTAGCAGAGCAAGTATTAAGAGAGTGTCAGAAC | |
| | | AACAAGAAGCTTCTGACCTTGTATTCTCAGGCCCAAAAAAGCCTCG | |
| | | GGTCGACATCCCAAAACAAGAAACCCAAGAAGAAAGCTCACATTC | |
| | | ACTCCAAAGAGAATCGAGACCGTGGGAGACCGAGGAAGAAAGCG | |
| | | AGACAGAAGCCCTCTCGCAAGAGAGCCAAGAGGTCCCCTTCCAAC | |
| | | AGCAGTTGCAGCAGCAGTACCAAGAGCAGCTCAAGCTCAGACAGG | |
| | | GAATCAAAGTCCTCTTCGAGCAGCTCATAAGGACCCAACAAGGGG | |
| | | TCCATGTAAACCCATGCCTACAGTAG | |
| CAF05753.1 | AJ620233.1 | ATGCACTTTTCTCGAATAAGCAGAAAGAAAAGGAAAGTGCTACTGC | 152 |
| | | TTTGCGTGCCAGCAGCTAAGAAAAAACCAACTGCTATGAGCTTCTG | |
| | | GAAACCTCCGGTACACAATGTCACGGGGATCCAACGCATGTGGTA | |
| | | TGAGTCCTTTCACCGTGGCCACGCTTCTTTTTGTGGTTGTGGGAAT | |
| | | CCTATACTTCACATTACTGCACTTGCTGAAACATATGGCCGTCCAA | |
| | | CAGGCCCGAGACCTTCTGGGCCACCGGGAGTAGACCCCAACCCC | |
| | | CACATCCGTAGAGCCAGGCCTGCCCCGGCCGCTCCGGAGCCCTC | |
| | | ACAGGTTGATTCGAGACCAGCCCTGACATGGCATGGGGATGGTG | |
| | | GAAGCGACGGAGGCGCTGGTGGTTCCGGAAGCGGTGGACCCGT | |
| | | GGCAGACTTCGCAGACGATGGCCTCGATCAGCTCGTCGCCGCCC | |
| | | TAGACGACGAAGAGTAA | |
| CAF05754.1 | AJ620233.1 | ATGGCATGGGGATGGTGGAAGCGACGGAGGCGCTGGTGGTTCCG | 153 |
| | | GAAGCGGTGGACCCGTGGCAGACTTCGCAGACGATGGCCTCGAT | |
| | | CAGCTCGTCGCCGCCCTAGACGACGAAGAGTAAGGGGGCGCAGA | |
| | | CGGTGGAGGAGGGGGAGACGAAAAACAAGGACTTACAGACGCAG | |
| | | GAGACGCTTTAGACGCAGGAGACGAAAAGCAAAACTTATAGTAAA | |
| | | ACTGTGGCAACCTGCAGTAATTAAAAGATGCAGAATAAAGGGATAC | |
| | | ATACCACTGATTATAGGTGGGAACGGTACCTTTGCCACAAACTTTA | |
| | | CCAGTCACATAAATGACAGAATAATGAAAGGCCCCTTCGGGGGAG | |
| | | GACACAGCACTATGAGGTTCAGCCTCTACATTTTGTTTGAGGAGCA | |
| | | CCTCAGACACATGAACTTCTGGACCAGAAGCAACGATAACCTAGA | |
| | | GCTAACCAGATACTTGGGGGCTTCAGTAAAAATATACAGGCACCC | |
| | | AGACCAAGACTTTATAGTAATATACAACAGAAGAACCCCTCTAGGA | |
| | | GGCAACATCTACACAGCACCCTCTCTACACCCAGGCAATGCCATTT | |
| | | TAGCAAAACACAAAATATTAGTACCAAGTTTACAGACAAGACCAAA | |
| | | GGGTAGAAAAGCAATTAGACTAAGAATAGCACCCCCCACACTCTTT | |
| | | ACAGACAAGTGGTACTTTCAAAAGGACATAGCCGACCTCACCCTTT | |
| | | TCAACATCATGGCAGTTGAGGCTGACTTGCGGTTTCCGTTCTGCTC | |
| | | ACCACAAACTGACAACACTTGCATCAGCTTCCAGGTCCTTAGTTCC | |
| | | GTTTACAACAACTACCTCAGTATTAATACCTTTAATAATGACAACTC | |
| | | AGACTCAAAGTTAAAAGAATTTTTAAATAAAGCATTTCCAACAACAG | |
| | | GCACAAAAGGAACAAGTTTAAATGCACTAAATACATTTAGAACAGA | |
| | | AGGATGCATAAGTCACCCACAACTAAAAAAACCAAACCCACAAATA | |
| | | AACAAACCATTAGAGTCACAATACTTTGCACCTTTAGATGCCCTCT | |
| | | GGGGAGACCCCATATACTATAATGATCTAAATGAAAACAAAAGTTT | |
| | | GAACGATATCATTGAGAAAATACTAATAAAAAACATGATTACATACC | |
| | | ATGCAAAACTAAGAGAATTTCCAAATTCATACCAAGGAAACAAGGC | |
| | | CTTTTGCCACCTAACAGGCATATACAGCCCACCATACCTAAACCAA | |
| | | GGCAGAATATCTCCAGAAATATTTGGACTGTACACAGAAATAATTT | |
| | | ACAACCCTTACACAGACAAAGGAACTGGAAACAAAGTATGGATGG | |
| | | ACCCACTAACTAAAGAGAACAACATATATAAAGAAGGACAGAGCAA | |
| | | ATGCCTACTGACTGACATGCCCCTATGGACTTTACTTTTTGGATAT | |
| | | ACAGACTGGTGTAAAAAGGACACTAATAACTGGGACTTACCACTAA | |
| | | ACTACAGACTAGTACTAATATGCCCTTATACCTTTCCAAAATTGTAC | |
| | | AATGAAAAGGTAAAAGACTATGGGTACATCCCGTACTCCTACAAAT | |
| | | TCGGAGCGGGTCAGATGCCAGACGGCAGCAACTACATACCCTTTC | |
| | | AGTTTAGAGCAAAGTGGTACCCCACAGTACTACACCAGCAACAGG | |
| | | TAATGGAGGACATAAGCAGGAGCGGGCCCTTTGTACCTAAGGTAG | |
| | | AAAAACCAAGCACTCAGCTGGTAATGAAGTACTGTTTTAACTTTAA | |
| | | CTGGGGCGGTAACCCTATCATTGAACAGATTGTTAAAGACCCCAG | |
| | | CTTCCAGCCCACCTATGAAATACCCGGTACCGGTAACATCCCTAG | |
| | | AAGAATACAAGTCATCGACCCGCGGGTCCTGGGACCGCACTACTC | |
| | | GTTCCGGCCATGGGACATGCGCAGACACACATTTAGCAGAGCAAG | |
| | | TATTAAGAGAGTGTCAGAACAACAAGAAACTTCTGACCTTGTATTC | |
| | | TCAGGCCCAAAAAAGCCTCGGGTCGACATCCCAAAACAAGAAACC | |
| | | CAAGAAGAAAGCTCACATTCACTCCAAAGAGAATCGAGACCGTGG | |
| | | GAGACCGAGGAAGAAAGCGAGACAGAAGCCCTCTCGCAAGAGAG | |
| | | CCAAGAGGTCCCCTTCCAACAGCAGTTGCAGCAGCAGTACCAAGA | |
| | | ACAGCTCAAGCTCAGACAGGGAATCAAAGTCCTCTTCGAGCAGCT | |
| | | CATAAGGACCCAACAAGGGGTCCATGTAAACCCATGCCTACAGTAG | |
| CAF05755.1 | AJ620234.1 | ATGCACTTTTCTCGAATAAGCAGAAAGAAAAGGAAAGTGCTACTGC | 154 |
| | | TTTGCGTGCCAGCAGCTAAGAAAAAACCAACTGCTATGAGCTTCTG | |
| | | GAAACCTCCGGTACACAATGTCACGGGGATCCAACGCATGTGGTA | |
| | | TGGGTCCTTTCACCGTGGCCACGCTTCTTTTTGTGGTTGTGGGAAT | |
| | | CCTATACTTCACATTACTGCACTTGCTGAAACATATGGCCATCCAA | |
| | | CAGGCCCGAGACCTTCTGGGCCACCGGGAGTAGACCCCAACCCC | |
| | | CACATCCGTAGAGCCAGGCCTGCCCCGGCCGCTCCGGAGCCCTC | |
| | | ACAGGTTGATTCGAGACCAGCCCTGACATGGCATGGGGATGGTG | |
| | | GAAGCGACGGAGGCGCTGGTGGTCCCGGAAGCGGTGGACCCGT | |
| | | GGCAGACTTCGCAGACGATGGCCTCGATCAGCTCGTCGCCGCCC | |
| | | TAGACGACGAAGAGTAA | |
| CAF05756.1 | AJ620234.1 | ATGGCATGGGGATGGTGGAAGCGACGGAGGCGCTGGTGGTCCCG | 155 |
| | | GAAGCGGTGGACCCGTGGCAGACTTCGCAGACGATGGCCTCGAT | |
| | | CAGCTCGTCGCCGCCCTAGACGACGAAGAGTAAGGAGGCGCAGA | |
| | | CGGTGGAGGAGGGGGAGACGAAAAACAAGGACTTACAGACGCAG | |
| | | GAGACGCTTTAGACGCAGGAGACGAAAAGCAAAACTTATAATAAAA | |
| | | CTGTGA | |
| CAF05757.1 | AJ620234.1 | ATGAAAGGCCCCTTCGGGGGAGGACACAGCACTATGAGGTTCAG | 156 |
| | | CCTCTACATTTTGTTTGAGGAGCACCTCAGACACATGAACTTCTGG | |
| | | ACCAGAAGCAACGATAACCTAGAGCTAACCAGATACTTGGGGGCT | |
| | | TCAGTAAAAATATACAGGCACCCAGACCAAGACTTTATAGTAATAT | |
| | | ACAACAGAAGAACCCCTCTAGGAGGCAACATCTACACAGCACCCT | |
| | | CTCTACACCCAGGCAATGCCATTTTAGCAAAACACAAAATATTAGT | |
| | | ACCAAGTTTACAGACAAGACCAAAGGGTAGAAAAGCAATTAGACTA | |
| | | AGAATAGCACCCCCCACACTCTTTACAGACAAGTAG | |
| CAF05758.1 | | ATGGCAGTTGAGGCTGACTTGCGGTTTCCGTTCTGCTCACCACAA | 157 |
| | | ACTGACAACACTTGCATCAGCTTCCAGGTCCTTAGTTCCGTTTACA | |
| | | ACAACTACCTCAGTATTAATACCTTTAATAATGACAACTCAGACTCA | |
| | | AAGTTAAAAGAATTTTTAAATAAAGCATTTCCAACAACAGGCACAAA | |
| | | AGGAACAAGTTTAAATGCACTAAATACATTTAGAACAGAAGGATGC | |
| | | ATAAGTCACCCACAACTAAAAAAACCAAACCCACAAACAAACAAAC | |
| | | CATCAGAGTCACAATACTTTGCACCTTTAGATGCCCTCTGGGGAGA | |
| | | CCCCATATACTATAATGATCTAAATGAAAAGAAAAGTTTCAAGAATA | |
| | | TCATTGAGAACATACTAATAAAAAACATGATTACATACCATGAAAAA | |
| | | CTAACAGAATTTCCAAATTCATACCAAGGAAACAAGGCCTTTTGCC | |
| | | ACCTAACAGGCATATACAGCCCACCATACCTAAACCAAGGCAGAAT | |
| | | ATCTCCAGAAATATTTGGACTGTACACAGAAATAATTTACAACCCTT | |
| | | ACACAGACAAAGGAACTGGAAACAAAGTATGGATGGACCCACTAA | |
| | | CTAAAGAGAACAACATATATAAAGAAGGACAGAGCAAATGCCTACT | |
| | | GACTGACATGCCCCTATGGACTTTACTTTTTGGATATACAGACTGG | |
| | | TGTAAAAAGGACACTAATAACTGGGACTTACCACTAAACTACAGAC | |
| | | TAGTACTAATATGCCCTTATACCTTTCCAAAATTGTACAATGAAAAG | |
| | | GTAAAAGACTATGGGTACATCCCGTACTCCTACAAATTCGGAGCG | |
| | | GGTCAGATGCCAGACGGCAGCAACTACATACCCTTTCAGTTTAGA | |
| | | GCAAAGTGGTACCCCACAGTACTACACCAGCAACAGGTAATGGAG | |
| | | GACATAAGCAGGAGCGGGCCCTTTGCACCTAAGGTAGAAAAACCA | |
| | | AGCACTCAGCTGGTAATGAAGTACTGTTTTAACTTTAACTGGGGCG | |
| | | GTAACCCTATCATTGAACAGATTGTTAAAGACCCCAGCTTCCAGCC | |
| | | CACCTATGAAATACCCGGTACCGGTAACATCCCTAGAAGAATACAA | |
| | | GTCATCGACCCGCGGGTCCTGGGACCGCACTACTCGTTCCGGTC | |
| | | ATGGGACATGCGCAGACACACATTTAGCAGAGCAAGTATTAAGAG | |
| | | AGTGTCAGAACAACAAGAAACTTCTGACCTTGTATTCTCAGGCCCA | |
| | | AAAAAGCCTCGGGTCGACATCCCAAAACAAGAAACCCAAGAAGAA | |
| | | AGCTCACATTCACTCCAAAGAGAATCGAGACCGTGGGAGACCGAG | |
| | | GAAGAAAGCGAGACAGAAGCCCTCTCGCAAGAGAGCCAAGAGGT | |
| | | CCCCTTCCAACAGCAGTTGCAGCAGCAGTACCAAGAGCAGCTCAA | |
| | | GCTCAGACAGGGAATCAAAGTCCTCTTCGAGCAGCTCATAAGGAC | |
| | | CCAACAAGGGGTCCATGTAAACCCATGCCTACAGTAG | |
| CAF05759.1 | | ATGCACTTTTCTCGAATAAGCAGAAAGAAAAGGAAAGTGCTACTGC | 158 |
| | | TTTGCGTGCCAGCAGCTAAGAAAAAACCAACTGCTATGAGCTTCTG | |
| | | GAAACCTCCGGTACACAATGTCACGGGGATCCAACGCATGTGGTA | |
| | | TGAGTCCTTTCACCGTGGCCACGCTTCTTTTTGTGATTGTGGGAAT | |
| | | CCTATACTTCACATTACTGCACTTGCTGAAACATATGGCCATCCAA | |
| | | CAGGCCCGAGACCTTCTGGGCCACCGGGAGTAGACCCCAACCCC | |
| | | CACATCCGTAGAGCCAGGCCTGCCCCGGCCGCTCCGGAGCCCTC | |
| | | ACAGGTTGATTCGAGACCAGCCCTGACATGGCATGGGGATGGTG | |
| | | GAAGCGACAGAGGCGCTGGTGGTTCCGGAAGCGGTGGACCCGTG | |
| | | GCAGACTTCGCAGACGATGGCCTCGATCAGCTCGTTGCCGCCCTA | |
| | | GACGACGAAGAGTAA | |
| CAF05760.1 | AJ620234.1 | ATGGCATGGGGATGGTGGAAGCGACAGAGGCGCTGGTGGTTCCG | 159 |
| | | GAAGCGGTGGACCCGTGGCAGACTTCGCAGACGATGGCCTCGAT | |
| | | CAGCTCGTTGCCGCCCTAGACGACGAAGAGTAAGGAGGCGCAGA | |
| | | CGGTGGAGGAGGGGGAGACGAAAAACAAGGACTTACAGACGCAG | |
| | | GAGACGCTTTAGACGCAGGAGACGAAAAGCAAAACTTATAATAAAA | |
| | | CTGTGGCAACCTGCAGTAATTAAAAGATGCAGAATAAAGGGATACA | |
| | | TACCACTGATTATAAGTGGGAACGGTACCTTTGCCACAAACTTTAC | |
| | | CAGTCACATAAATGACAGAATAATGAAGGGCCCCTTCGGGGGAGG | |
| | | ACACAGCACTATGAGGTTCAGTCTCTACATTTTGTTTGAGGAGCAC | |
| | | CTCAGACACATGAACTTCTGGACCAGAAGCAACGATAACCTAGAG | |
| | | CTAACCAGATACTTGGGGGCTTCAGTAAAAATATACAGGCACCCA | |
| | | GACCAAGACTTTATAGTAATATACAACAGAAGAACCCCTCTAGGAG | |
| | | GCAACATCTACACAGCACCCTCTCTACACCCAGGCAATGCCATTTT | |
| | | AGCAAAACACAAAATATTAGTACCAAGTTTACAGACAAGACCAAAG | |
| | | GGTAGAAAAGCAATTAGACTAAGAATAGCACCCCCCACACTCTTTA | |
| | | CAGACAAGTGGTACTTTCAAAAGGACATAGCCGACCTCACCCTTTT | |
| | | CAACATCATGGCAGTTGAGGCTGACTTGCGGTTTCCGTTCTGCTC | |
| | | ACCACAAACTGACAACACTTGCATCAGCTTCCAGGTCCTTAGTTCC | |
| | | GTTTACAACAACTACCTCAGTATTAATACCTTTAATAATGACAACTC | |
| | | AGACTCAAAGTTAAAAGAATTTTTAAATAAAGCATTTCCAACAACAG | |
| | | GCACAAAAGGAACAAGTTTAAATGCACTAAATACATTTAGAACAGA | |
| | | AGGATGCATAAGTCACCCACAACTAAAAAAACCAAACCCACAAATA | |
| | | AACAAACCATTAGAGTCACAATACTTTGCACCTTTAGATGCCCTCT | |
| | | GGGGAGACCCCATATACTATAATGATCTAAATGAAAACAAAAGTTT | |
| | | GAACGATATCATTGAGAAAATACTAATAAAAAACATGATTACATACC | |
| | | ATGCAAAACTAAGAGAATTTCCAAATTCATACCAAGGAAACAAGGC | |
| | | CTTTTGCCACCTAACAGGCATATACAGCCCACCATACCTAAACCAA | |
| | | GGCAGAATATCTCCAGAAATATTTGGACTGTACACAGAAATAATTT | |
| | | ACAACCCTTACACAGACAAAGGAACTGGAAACAAAGTATGGATGG | |
| | | ACCCACTAACTAAAGAGAACAACATATATAAAGAAGGACAGAGCAA | |
| | | ATGCCTACTGACTGACATGCCCCTATGGACTTTACTTTTTGGATAT | |
| | | ACAGACTGGTGTAAAAAGGACACTAATAACTGGGACTTACCACTAA | |
| | | ACTACAGACTAGTACTAATATGCCCTTATACCTTTCCAAAATTGTAC | |
| | | AATGAAAAGGTAAAAGACTATGGGTACATCCCGTACTCCTACAAAT | |
| | | TCGGAGCGGGTCAGATGCCAGACGGCAGCAACTACATACCCTTTC | |
| | | AGTTTAGAGCAAAGTGGTACCCCACAGTACTACACCAGCAACAGG | |
| | | TAATGGAGGACATAAGCAGGAGCGGGCCCTTTGCACCTAAGGTAG | |
| | | AAAAACCAAGCACTCAGCTGGTAATGAAGTACTGTTTTAACTTTAA | |
| | | CTGGGGCGGTAACCCTATCATTGAACAGATTGTTAAAGACCCCAG | |
| | | CTTCCAGCCCACCTATGAAATACCCGGTACCGGTAACATCCCTAG | |
| | | AAGAATACAAGTCATCGACCCGCGGGTCCTGGGACCGCACTACTC | |
| | | GTTCCGGTCATGGGACATGCGCAGACACACATTTAGCAGAGCAAG | |
| | | TATTAAGAGAGTGTCAGAACAACAAGAAACTTCTGACCTTGTATTC | |
| | | TCAGGCCCAAAAAAGCCTCGGGTCGACATCCCAAAACAAGAAACC | |
| | | CAAGAAGAAAGCTCACATTCACTCCAAAGAGAATCGAGACCGTGG | |
| | | GAGACCGAGGAAGAAAGCGAGACAGAAGCCCTCTCGCAAGAGAG | |
| | | CCAAGAGGTCCCCTTCCAACAGCAGTTGCAGCAGCAGTACCAAGA | |
| | | GCAGCTCAAGCTCAGACAGGGAATCAAAGTCCTCTTCGAGCAGCT | |
| | | CATAAGGACCCAACAAGGGGTCCATGTAAACCCATGCCTACAGTAG | |
| AAC28465.1 | AF079173.1 | ATGGCCTATGGCTGGTGGCGCCGAAGGAGAAGACGGTGGCGCAG | 160 |
| | | GTGGAGACCCAGACCATGGAGGCCCCGCTGGAGGACCCGAAGAC | |
| | | GCAGACCTGCTAGACGCCGTGGCCACCGCAGAAACGTAAGAAGA | |
| | | CGCCGCAGAGGAGGGAGGTGGAGGAGGAGATATAGGAGATGGAA | |
| | | AAGAAAGGGCAGGCGCAGAAAAAAAGCTAAAATAATAATAAGACA | |
| | | ATGGCAACCAAACTACAGAAGGAGATGTAACATAGTAGGCTACATC | |
| | | CCTGTACTAATATGTGGCGAAAATACTGTCAGCAGAAACTATGCCA | |
| | | CACACTCAGACGATACCAACTACCCAGGACCCTTTGGGGGGGGTA | |
| | | TGACTACAGACAAATTTACTTTAAGAATTCTGTATGACGAGTACAAA | |
| | | AGGTTTATGAACTACTGGACAGCATCTAACGAAGACCTAGACCTTT | |
| | | GTAGATATCTAGGAGTAAACCTGTACTTTTTCAGACACCCAGATGT | |
| | | AGATTTTATCATAAAAATTAATACCATGCCTCCTTTTCTAGACACAG | |
| | | AACTCACAGCCCCTAGACTACACCCAGGCATGCTAGCCCTAGACA | |
| | | AAAGAGCAAGATGGATACCTAGCTTAAAATCTATACCAGGAAAAAA | |
| | | ACACTATATTAAAATAAGAGTAGGGGCACCAAAAATGTTCACTGAT | |
| | | AAATGGTACCCCCAAACAGATCTTTGTGACATGGTGCTTCTAACTG | |
| | | TCTATGCAACCGCAGCGGATATACCATATCCGTTCGGCTCACCACT | |
| | | AACTGACTCTGTGGTTGTGAACTTCCAGGTTCTGCAATCCATGTAT | |
| | | GATAAATACATTAGCATATTACCAGACCAAAAGTCACAAAGTAAGT | |
| | | CACTACTTAGTAACATAGCAAATTACATTCCCTTTTATAATACCACA | |
| | | CAAACTATAGCCCAATTAAAGCCATTTATAGATGCAGGCAATATAA | |
| | | CATCAGGCACAGCAGCAACAACATGGGGATCATACATAAACACAA | |
| | | CCAAATTTACTACAACAGCCACAACAACTTATACATATCCAGGCAC | |
| | | TACAACTAACACAGTTACTATGTATTCCTCTAATGACTCCTGGTACA | |
| | | GAGGAACAGTATATAACAATCAAATTAAAGAGTTACCAAAAAAAGC | |
| | | AGCTGAATTATACTCAAAAGCAACAAAAACCTTGCTAGGAAACACC | |
| | | TTCACAACTGAAGACTGCACACTAGAATACCATGGAGGACTATACA | |
| | | GCTCAATATGGCTATCCCCTGGTAGATCTTACTTTGAAACACCAGG | |
| | | AGCATACACAGACATAAAGTACAATCCATTCACAGACAGAGGAGAA | |
| | | GGCAACATGTTATGGATAGACTGGCTAAGCAAAAAAAACATGAACT | |
| | | ATGACAAAGTACAAAGTAAATGCTTAGTATCAGACCTACCTCTATG | |
| | | GGCATCAGCATATGGATATGTAGAATTTTGTGCAAAAAGTACAGGA | |
| | | GACCAGAACATACACATGAATGCCAGGCTACTAATAAGAAGTCCCT | |
| | | TTACAGACCCACAGCTACTAGTACACACAGACCCCACAAAAGGCTT | |
| | | TGTTCCCTACTCTTTAAACTTTGGAAATGGTAAAATGCCAGGAGGT | |
| | | AGTAGTAATGTGCCTATTAGAATGAGAGCTAAATGGTATCCAACAT | |
| | | TGTTTCACCAACAAGAAGTACTAGAGGCCTTAGCACAGTCAGGCC | |
| | | CCTTTGCATACCACTCAGACATTAAAGAAGTATCTCTGGGTATGAA | |
| | | ATACCGTTTTAAGTGGATCTGGGGTGGAAACCCCGTTCGCCAACA | |
| | | GGTTGTTAGAAATCCCTGCAAAGAAACCCACTCCTCGGGCAATAG | |
| | | AGTCCCTAGAAGCTTACAAATCGTTGACCCGAAATACAACTCACCG | |
| | | GAACTCACATTCCATACCTGGGACTTCAGACGTGGCCTCTTTGGC | |
| | | CCGAAAGCTATTCAGAGAATGCAACAACAACCAACAACTACTGACA | |
| | | TTTTTTCAGCAGGCCGCAAGAGACCCAGGAGGGACACCGAGGTGT | |
| | | ACCACTCCAGCCAAGAAGGGGAGCAAAAAGAAAGCTTACTTTTCC | |
| | | CCCCAGTCAAGCTCCTCAGACGAGTCCCCCCGTGGGAAGACTCG | |
| | | CAGCAGGAGGAAAGCGGGTCGCAAAGCTCAGAGGAAGAGACGCA | |
| | | GACCGTCTCCCAGCAGCTCAAGCAGCAGCTGCAGCAACAGCAAAT | |
| | | CCTGGGAGTCAAACTCAGACTCCTGTTCGACCAAGTCCAAAAAATC | |
| | | CAACAAAATCAAGATATCAACCCTACCTTGTTACCAAGGGGGGGG | |
| | | GATCTAGCATCGTTATTTCAAATAGCACCATAA | |
| AAD20024.1 | AF129887.1 | ATGGCCTATGGGTTGTGGAGGAGACGGCGAAGGAGGTGGAAGAG | 161 |
| | | GTGGAGACGCAGACGGTGGAGACGCCGCTGGAGGACCCGCCGA | |
| | | CGCAGACCTGCTGGACGCCGTAGACGCCGCAGAACAGTAAGGAG | |
| | | ACGGCGCAGGCGCGGGAGGTGGAGGAGGAGATATAGGAGATGG | |
| | | AGGCGAAAAGGCAGACGCAGGAAAAAGAAAAAACTCATAATAAGA | |
| | | CAATGGCAGCCAAACTATACCAGAAAGTGCAACATTGTGGGTTATA | |
| | | TGCCAGTTATAATGTGTGGCGAAAATACTGTCAGCAGAAACTATGC | |
| | | CACACACTCAGACGATACCAACTACCCAGGACCCTTTGGGGGGGG | |
| | | TATGACTACAGACAAATTTACTTTAAGAATTCTGTATGACTGGTACA | |
| | | AAAGGTTTATGAACTACTGGACAGCATCTAACGAAGACCTAGACCT | |
| | | TTGTAGATATCTAGGAGTGAACCTGTACTTTTTCAGACACCCAGAT | |
| | | GTAGATTTTATCATAAAAATTAATACCATGCCTCCTTTTCTAGACAC | |
| | | AGAACTCACAGCCCCTAGCATACACCCAGGCATGCTAGCCCTAGA | |
| | | CGAAAGAGCAAGATGGATACCTAGCTTAAAATCTAGACCAGGAAA | |
| | | AAAACACTATATTAAAATAAGAGTAGGGGCACCAAAAATGTTCACT | |
| | | GATAAATGGTACCCCCAAACAGATCTTTGTGACATGGTGCTTCTAA | |
| | | CTGTCTATGCAACCGCAGCGGATATGCAATATCCGTTCGGCTACC | |
| | | CACTAACTGACTCTGTGGTTGTGAACTTCCAGGTTCTGCAATCCAT | |
| | | GTATGATAAATACATTAGCATATTACCAGACCAAAAGTCACAAAGA | |
| | | GAGTCACTACTTAGTAACATAGCAAATTACATTCCCTTTTATAATAC | |
| | | CACACAAACTATAGCCCAATTAAAGCCATTTATAGATGCAGGCAAT | |
| | | ATAACATCAGGCACAACAGCAACAACATGGGGATCATACATAAACA | |
| | | CAACCAAATTTACTACAACAGCCACAACAACTTATACATATCCAGG | |
| | | CACTACAACTAACACAGTTACTATGTTAACCTCTAATGACTCCTGGT | |
| | | ACAGAGGAACAGTATATAACAATCAAATTAAAGAGTTACCAAAAAA | |
| | | AGCAGCTGAATTATACTCAAAAGCAACAAAAACCTTGCTAGGAAAC | |
| | | ACCTTCACAACTGAAGACTGCACACTAGAATACCATGGAGGACTAT | |
| | | ACAGCTCAATATGGCTATCCCCTGGTAGATCTTACTTTGAAACACC | |
| | | AGGAGCATACACAGACATGAAGTACAACCCATTCACAGACAGAGG | |
| | | AGAAGGCAACATGTTATGGATAGACTGGCTAAGCAAAAAAAACATG | |
| | | AACTATGACAAAGTACAAAGTAAATGCTTAGTATCAGACCTACCTC | |
| | | TATGGGCAGCAGCATATGGTTATTTAGAATTCTGCTCTAAAAGCAC | |
| | | AGGAGACACAAACATACACATGAATGCCAGACTACTAATAAGAAGT | |
| | | CCTTTTACAGACCCCCAGCTAATAGCACACACAGACCCCACTAAAG | |
| | | GCTTTGTACCCTATTCCTTAAACTTTGGAAATGGTAAAATGCCAGG | |
| | | AGGTAGCAGCAATGTTCCCATAAGAATGAGAGCTAAGTGGTACCC | |
| | | CACTTTATTCCACCAACAAGAAGTTCTAGAGGCCTTAGCACAGTCA | |
| | | GGACCCTTTGCTTATCACTCAGACATTAAAAAAGTATCTCTAGGCA | |
| | | TAAAATACCGTTTTAAGTGGATCTGGGGTGGAAACCCCGTTCGCC | |
| | | AACAGGTTGTTAGAAACCCCTGCAAGGAACCCCACTCCTCGGTCA | |
| | | ATAGAGTCCCTAGAAGCATACAAATCGTTGACCCGAAATACAACTC | |
| | | ACCGGAACTTACCATCCATGCCTGGGACTTCAGACGTGGCTTCTTT | |
| | | GGCCCGAAAGCTATTCAAAGAATGCAACAACAACCAACTGCTACT | |
| | | GAATTTTTTTCAGCAGGCCGCAAGAGACCCAGAAGGGACACAGAA | |
| | | GTGTATCAGTCCGACCAAGAAAAGGAGCAAAAAGAAAGCTCGCTT | |
| | | TTCCCCCCAGTCAAGCTCCTCCGAAGAGTCCCCCCATGGGAGGAC | |
| | | TCGGAACAGGAGCAAAGCGGGTCGCAAAGCTCAGAGGAAGAGAC | |
| | | CCACACCGTCTCCCAGCAGCTCAAACAGCAGCTTCAGCAGCAGCG | |
| | | GATCCTCGGCGTCAAGCTCAGAGTCCTGTTCCACCAAGTCCACAA | |
| | | AATCCAACAAAATCAACATATCAACCCTACCTTATTGCCAAGGGGT | |
| | | GGGGCCCTAGCATCCTTGTCTCAGATTGCACCATAA | |
| AAD29634.1 | AF116842.1 | ATGGCCTATGGCTTGTGGCACCGAAGGAGAAGACGGTGGCGCAG | 162 |
| | | GTGGAAACGCACACCATGGAAGCGCCGCTGGAGGACCCGAAGAC | |
| | | GCAGACCTGCTAGACGCCGTGGCCGCCGCAGAAACGTAAGGAGA | |
| | | CGCCGCAGAGGAGGGAGGTGGAGGAGGAGATATAGGAGATGGAA | |
| | | AAGAAAGGGCAGGCGCAGAAAAAAAGCTAAAATAATAATAAGACA | |
| | | ATGGCAACCAAACTACAGAAGGAGATGTAACATAGTAGGCTACATC | |
| | | CCTGTACTAATATGTGGCGAAAATACTGTCAGCAGAAATTATGCCA | |
| | | CACACTCAGACGATACCAACTACCCAGGACCCTTTGGGGGGGGTA | |
| | | TGACTACAGACAAATTTACTTTAAGAATTCTGTGTGACGAGTACAAA | |
| | | AGGTTTATGAACTACTGGACAGCATCTAACGAAGACCTAGACCTTT | |
| | | GTAGATATCTAGGAGTAAACCTGTACTTTTTCAGACACCCAGATGT | |
| | | AGATTTTATCATAAAAATTAATACCATGCCTCCTTTTCTAGACACAG | |
| | | AACTCACAGCCCCTAGCATACACCCAGGCATGCTAGCCCTAGACA | |
| | | AAAGAGCAAGATGGATACCTAGCTTAAAATCTAGACCAGGAAAAAA | |
| | | ACACTATATTAAAATAAGAGTAGGGGCACCAAAAATGTTCACTGAT | |
| | | AAATGGTACCCCCAAACAGATCTCTGTGACATGGTGCTTCTAACTG | |
| | | TCTATGCAACCACAGCGGATATGCAATATCCGTTCGGCTCACCACT | |
| | | AACTGACTCTGTGGTTGTGAACTTCCAGGTTCTGCAATCCATGTAT | |
| | | GATAAAACAATTAGCATATTACCAGACGAAAAATCACAAAGAGAAA | |
| | | TTCTACTTAACAAGATAGCAAGTTACATTCCCTTTTATAATACCACA | |
| | | CAAACTATAGCCCAATTAAAGCCATTTATAGATGCAGGCAATGTAA | |
| | | CATCAGGCGCAACAGCAACAACATGGGCATCATACATAAACACAA | |
| | | CCAAATTTACTACAGCAACCACAACAACTTATGCATATCCAGGCAC | |
| | | CAACAGACCCCCAGTAACTATGTTAACCTGTAATGACTCCTGGTAC | |
| | | AGAGGAACAGTATATAACACACAAATTCAACAGTTACCAATAAAAG | |
| | | CAGCTAAATTATACTTAGAGGCAACAAAAACCTTGCTAGGAAACAA | |
| | | CTTCACAAATGAGGACTACACACTAGAATATCATGGAGGACTGTAC | |
| | | AGCTCAATATGGCTATCCCCTGGTAGATCTTACTTTGAAACAACAG | |
| | | GAGCATACACAGACATAAAGTACAATCCATTCACAGACAGAGGAG | |
| | | AAGGCAACATGTTATGGATAGACTGGCTAAGCAAAAAAAACATGAA | |
| | | CTATGACAAAGTACAAAGTAAATGCTTAGTACGAGACCTACCTCTA | |
| | | TGGGCAGCAGCATATGGATATGTAGAATTCTGTGCAAAAAGTACAG | |
| | | GAGACAAGAACATATACATGAATGCCAGGCTACTAATAAGAAGTCC | |
| | | CTTTACAGACCCACAACTACTAGTACACACAGACCCCACAAAAGGC | |
| | | TTTGTTCCTTACTCTTTAAACTTTGGAAATGGTAAAATGCCAGGAG | |
| | | GTAGTAGTAATGTGCCTATTAGAATGAGAGCTAAATGGTATCCAAC | |
| | | ATTATTTCACCAGCAAGAAGTACTAGAGGCCTTAGCACAGTCAGGC | |
| | | CCCTTTGCATACCACTCAGACATTAAAAAAGTATCTCTGGGTATGA | |
| | | AATACCGTTTTAAGTGGATCTGGGGTGGAAACCCCGTTCGCCAAC | |
| | | AGGTTGTTAGAAATCCCTGCAAAGAAACCCACTCCTCGGGCAATA | |
| | | GAGTCCCTAGAAGCTTACAAATCGTTGACCCGAAATACAACTCACC | |
| | | GGAACTCACATTCCATACCTGGGACTTCAGACGTGGTCTCTTTGG | |
| | | CCCAAGAGCTATTCAAAGAATGCAACAACAACCAACAACTACTGAC | |
| | | ATTCTTTCAGCAGGCCGCAAGAGACCCAGAAAGGACACGGAGGTG | |
| | | TACCACCCCAGCCAAGAAGGGGAGCAAAAAGAAAGCTTACTTTTC | |
| | | CCCCCAGTCAAGCTCCTCAGACGAGTCCCCCCGTGGGAAGACTC | |
| | | GCAGCAGGAGGAAAGCGGGTCGCAAAGCTCAGAGGAAGAGACGC | |
| | | AGACCGTCTCCCAGCAGCTCAAGCAGCAGCTGCAGCAACAGCAAA | |
| | | TCCTGGGAGTCAAACTCAGACTCCTGTTCGACCAAGTCCAAAAAAT | |
| | | CCAACAAAATCAAGATATCAACCCTACCTTGTTACCAAGGGGGGG | |
| | | GGATCTAGCATCGTTATTTCAAATAGCACCATAA | |
| BAA85662.1 | AB026345.1 | ATGGCCTATGGCTGGTGGCGCCGAAGGAGAAGACGGTGGCGCAG | 163 |
| | | GTGGAGACGCAGACCATGGAGGCGCCGCTGGAGGACCCGAAGAC | |
| | | GCAGACCTGCTAGACGCCGTGGCCGCCGCAGAAACGTAAGGAGA | |
| | | CGCCGCAGAGGAGGGAGGTGGAGGAGGAGATATAGGAGATGGAA | |
| | | AAGAAAGGGCAGGCGCAGAAAAAAAGCTAAAATAATAATAAGACA | |
| | | ATGGCAACCAAACTACAGAAGGAGATGTAACATAGTAGGCTACATC | |
| | | CCTGTACTAATATGTGGCGAAAATACTGTCAGCAGAAACTATGCCA | |
| | | CACACTCAGACGATACTAACTACCCAGGACCCTTTGGGGGGGGTA | |
| | | TGACTACAGACAAATTTACTTTAAGAATTCTGTATGACGAGTACAAA | |
| | | AGGTTTATGAACTACTGGACAGCATCTAACGAAGACCTAGACCTTT | |
| | | GTAGATATCTAGGAGTAAACCTATACTTTTTCAGACACCCAGATGT | |
| | | AGATTTTATTATAAAAATTAATACCATGCCTCCTTTTCTAGACACAG | |
| | | AACTCACAGCCCCTAGCATACACCCAGGCATGCTAGCCCTAGACA | |
| | | AAAGAGCAAGATGGATACCTAGCTTAAAATCTAGACCAGGAAAAAA | |
| | | ACACTATATTAAAATAAGAGTAGGGGCACCAAAAATGTTCACTGAT | |
| | | AAATGGTACCCCCAAACAGATCTTTGTGACATGGTGCTTCTAACTG | |
| | | TCTATGCAACCGCAGCGGATATGCAATATCCGTTCGGCTCACCAC | |
| | | TAACTGACTCTGTGGTTGTGAACTTCCAGGTTCTGCAATCCATGTA | |
| | | TGATGAAAAAATTAGCATATTACCAGACCAAAAATCACAAAGAGAA | |
| | | AGCCTACTTACTAGCATAGCAAATTACATTCCCTTTTATAATACCAC | |
| | | ACAAACTATAGCCCAATTAAAGCCATTTATAGATGCAGGCAATGTA | |
| | | ACATCAGGCACAACAGCAACAACATGGGGGTCATACATAAACACA | |
| | | ACCAAGTTTACTACAACAGCCACAACAACTTATACATATCCAGGCA | |
| | | CCACCACAACCACAGTAACTATGTTAACCTCTAATGACTCCTGGTA | |
| | | CAGAGGAACAGTATATAACAACCAAATTAAAGACTTACCAAAAAAA | |
| | | GCAGCTGAATTATACTCAAAAGCAACAAAAACCTTGCTAGGAAACA | |
| | | CCTTCACAACTGAAGACTACACACTAGAATACCATGGAGGACTGTA | |
| | | CAGCTCAATATGGCTATCCCCTGGTAGATCTTACTTTGAAACACCA | |
| | | GGAGCATATACAGACATAAAGTACAATCCATTTACAGACAGAGGAG | |
| | | AAGGCAACATGTTATGGATAGACTGGCTAAGCAAAAAAAACATGAA | |
| | | CTACGACAAAGTACAGAGTAAATGCTTAATATCAGACCTACCTCTA | |
| | | TGGGCAGCAGCATATGGATATGTAGAATTTTGTGCAAAAAGTACAG | |
| | | GAGACCAGAACATACACATGAATGCCAGGCTACTAATAAGAAGTC | |
| | | CCTTTACAGACCCACAACTACTAGTACACACAGACCCCACAAAAGG | |
| | | CTTTGTTCCTTACTCTTTAAACTTTGGAAATGGTAAAATGCCAGGAG | |
| | | GTAGTAGTAATGTGCCTATTAGAATGAGAGCTAAATGGTATCCAAC | |
| | | ATTATTTCACCAGCAAGAAGTACTAGAGGCCTTAGCACAGTCAGGC | |
| | | CCCTTTGCATACCACTCAGACATTAAAAAAGTATCTCTGGGTATGA | |
| | | AATACCGTTTTAAGTGGATCTGGGGTGGAAACCCCGTTCGCCAAC | |
| | | AGGTTGTTAGAAATCCCTGCAAAGAAACCCACTCCTCGGGCAATA | |
| | | GAGTCCCTAGAAGCTTACAAATCGTTGACCCGAAATACAACTCACC | |
| | | GGAACTCACATTCCATACCTGGGACTTCAGACGTGGCCTCTTTGG | |
| | | CCCGAAAGCTATTCAGAGAATGCAACAACAACCAACAACTACTGAC | |
| | | ATTTTTTCAGCAGGCCGCAAGAGACCCAGGAGGGACACCGAGGT | |
| | | GTACCACTCCAGCCAAGAAGGGGAGCAAAAAGAAAGCTTACTTTT | |
| | | CCCCCCAGTCAAGCTCCTCAGACGAGTCCCCCCGTGGGAAGACT | |
| | | CGCAGCAGGAGGAAAGCGGGTCGCAAAGCTCAGAGGAAGAGACG | |
| | | CAGACCGTCTCCCAGCAGCCCAAGCAGCAGCTGCAGCAACAGCG | |
| | | AATCCTGGGAGTCAAACTCAGACTCCTGTTCAACCAAGTCCAAAAA | |
| | | ATCCAACAAAATCAAGATATCAACCCTACCTTGTTACCAAGGGGGG | |
| | | GGGATCTAGCATCCTTATTTCAAGTAGCACCATAA | |
| BAA85664.1 | AB026346.1 | ATGGCCTATGGCTGGTGGCGCCGAAGGAGAAGACGGTGGCGCAG | 164 |
| | | GTGGAGACGCAGACCATGGAGGCGCCGCTGGAGGACCCGAAGAC | |
| | | GCAGACCTGCTAGACGCCGTGGCCGCCGCAGAAACGTAAGGAGA | |
| | | CGCCGCAGAGGAGGGAGGTGGAGGAGGAGATATAGGAGATGGAA | |
| | | AAGAAAGGGCAGGCGCAGAAAAAAAGCTAAAATAATAATAAGACA | |
| | | ATGGCAACCAAACTACAGAAGGAGATGTAACATAGTAGGCTACATC | |
| | | CCTGTACTAATATGTGGCGAAAATACTGTCAGCAGAAACTATGCCA | |
| | | CACACTCAGACGATACCAACTACCCAGGACCCTTTGGGGGGGGTA | |
| | | TGACTACAGACAAATTTACTTTAAGAATTCTGTATGACGAGTACAAA | |
| | | AGGTTTATGAACTACTGGACAGCATCTAACGAAGATCTAGACCTTT | |
| | | GTAGATATCTAGGAGTAAACCTGTACTTTTTCAGACACCCAGATGT | |
| | | AGATTTTATCATAAAAATTAATACCATGCCTCCTTTTCTAGACACAG | |
| | | AACTCACAGCCCCTAGCATACACCCAGACATGCTAGCCCTAGACA | |
| | | AAAGAGCAAGATGGATACCTAGCTTAAAATCTAGACCGGGAAAAAA | |
| | | ACACTATATTAAAATAAGAGTTGGGGCACCAAAAATGTTCACTGAT | |
| | | AAATGGTACCCCCAAACAGATCTTTGTGACATGGTGCTTCTAACTG | |
| | | TCTATGCAACCACAGCGGATATGCAATATCCGTTCGGCTCACCACT | |
| | | AACTGACTCTGTGGTTGTGAACTTCCAGGTTCTGCAATCCATGTAT | |
| | | GATGAAAACATTAGCATATTACCAACCGAAAAATCAAAAAGAGATG | |
| | | TCCTACATAGTACTATAGCAAATTACACTCCCTTTTATAATACCACA | |
| | | CAAATTATAGCCCAATTAAGGCCATTTGTAGATGCAGGCAATCTAA | |
| | | CATCAGCGTCAACAACAACAACATGGGGATCATACATAAACACAAC | |
| | | CAAGTTTAATACAACAGCCACAACAACTTATACATATCCAGGCAGC | |
| | | ACGACAACCACAGTAACTATGTTAACCTGTAATGACTCCTGGTACA | |
| | | GAGGAACAGTATATAACAATCAAATTAGCAAGTTACCAAAACAAGC | |
| | | AGCTGAATTTTACTCAAAAGCAACAAAAACCTTGCTAGGAAACACG | |
| | | TTCACAACTGAGGACCACACACTAGAATACCATGGAGGACTGTAC | |
| | | AGCTCAATATGGCTATCCGCTGGTAGATCTTACTTTGAAACACCAG | |
| | | GAGCATATACAGACATAAAGTATAATCCATTCACAGACAGAGGAGA | |
| | | AGGCAACATGTTATGGATAGACTGGCTAAGCAAAAATAACATGAAC | |
| | | TATGACAAAGTACAAAGTAAATGCTTAATATCAGACCTACCTCTATG | |
| | | GGCAGCAGCATATGGATATGTAGAATTTTGTGCAAAAAGTACAGGA | |
| | | GACCAGAACATACACATGAATGCCAGACTACTAATAAGAAGTCCCT | |
| | | TTACAGACCCACAACTACTAGTACACACAGACCCCACAAAAGGCTT | |
| | | TGTTCCTTACTCTTTAAACTTTGGAAATGGTAAAATGCCAGGAGGT | |
| | | AGTAGTAATGTGCCTATTAGAATGAGAGCTAAATGGTATCCAACAT | |
| | | TATTTCACCAGCAAGAAGTACTAGAGGCCTTAGCACAGTCAGGCC | |
| | | CCTTTGCATACCACTCAGACATTAAAAAAGTATCTCTGGGTATGAA | |
| | | ATACCGTTTTAAGTGGATCTGGGGTGGAAACCCCGTTCGCCAACA | |
| | | GGTTGTTAGAAATCCCTGCAAAGAAACCCACTCCTCGGGCAATAG | |
| | | AGTCCCTAGAAGCTTACAAATCGTTGACCCGAAATACAACTCACCG | |
| | | GAACTCACATTCCATACCTGGGACTTCAGACGTGGCCTCTTTGGC | |
| | | CCGAAAGCTATTCAGAGAATGCAACAACAACCAACAACTACTGACA | |
| | | TTTTTTCAGCAGGCCGCAAGAGACCCAGGAGGGACACCGAGGTGT | |
| | | ACCACTCCAGCCAAGAAGGGGAGCAAAAAGAAAGCTTACTTTTCC | |
| | | CCCCAGTCAAGCTCCTCAGACGAGTCCCCCCGTGGGAAGACTCG | |
| | | CAGCAGGAGGAAAGCGGGTCGCAAAGCTCAGAGGAAGAGACGCA | |
| | | GACCGTCTCCCAGCAGCTCAAGCAGCAGCTGCAGCAACAGCGAAT | |
| | | CCTGGGAGTCAAACTCAGACTCCTGTTCAACCAAGTCCAAAAAATC | |
| | | CACCAAAATCAAGATATCAACCCTACCTTGTTACCAAGGGGGGGG | |
| | | GATCTAGCATCCTTATTTCAAATAGCACCATAA | |
| BAA85666.1 | AB026347.1 | ATGGCCTATGGCTGGTGGCGCCGAAGGAGAAGACGGTGGCGCAG | 165 |
| | | GTGGAGACGCAGACCATGGAGGCGCCGCTGGAGGACCCGAAGAC | |
| | | GCAGACCTGCTAGACGCCGTGGCCGCCGCAGAAACGTAAGGAGA | |
| | | CGCCGCAGAGGAGGGAGGTGGAGGAGGAGATATAGGAGATGGAA | |
| | | AAGAAAGGGCAGGCGCAGAAAAAAAGCTAAAATAATAATAAGACA | |
| | | ATGGCAACCAAACTACAGAAGGAGATGTAACATAGTAGGCTACATC | |
| | | CCTGTACTAATATGTGGCGAAAATACTGTCAGCAGAAACTATGCCA | |
| | | CACACTCAGACGATACCAACTACCCAGGACCCTTTGGGGGGGGTA | |
| | | TGACTACAGACAAATTTACTTTAAGAATTCTGTATGACGAGTACAAA | |
| | | AGGTTTATGAACTACTGGACAGCATCTAACGAAGATCTAGACCTTT | |
| | | GTAGATATCTAGGAGTAAACCTGTACTTTTTCAGACACCCAGATGT | |
| | | AGATTTTATCATAAAAATTAATACCATGCCTCCTTTTCTAGACACAG | |
| | | AACTCACAGCCCCTAGCATACACCCAGGCATGCTAGCCCTAGACA | |
| | | AAAGAGCAAGATGGATACCTAGCTTAAAATCTAGACCGGGAAAAAA | |
| | | ACACTATATTAAAATAAGAGTTGAGGCACCAAAAATGTTCACTGATA | |
| | | AATGGTACCCCCAAACAGATCTTTGTGACATGGTGCTTCTAACTGT | |
| | | CTATGCAACCACAGCGGATATGCAATATCCGTTCGGCTCACCACTA | |
| | | ACTGACTCTGTGGTTGTGAACTTCCAGGTTCTGCAATCCATGTATG | |
| | | ATCAAAACATTAGCATATTACCAACCGAAAAATCAAAGAGAACACA | |
| | | ACTACATGATAATATAACAAGGTACACTCCCTTTTATAATACCACAC | |
| | | AAACTATAGCCCAATTAAAGCCATTTGTAGATGCAGGCAATGTAAC | |
| | | ACCAGTGTCACCAACAACAACATGGGGATCATACATAAACACAACC | |
| | | AAGTTTACTACAACAGCCACAACAACTTATACATATCCAGGCACCA | |
| | | CGACAACCACAGTAACTATGTTAACCTGTAATGACTCCTGGTACAG | |
| | | AGGAACAGTATATAACAATCAAATTAGCCAGTTACCAAAAAAAGCA | |
| | | GCTGAATTTTACTCAAAAGCAACAAAAACCTTGCTAGGAGACACGT | |
| | | TCACAACTGAGGACTACACACTAGAATACCATGGAGGACTGTACA | |
| | | GCTCAATATGGCTATCCGCTGGTAGATCTTACTTTGAAACACCAGG | |
| | | AGTATATACAGACATAAAGTATAATCCATTCACAGACAGAGGAGAA | |
| | | GGCAACATGTTATGGATAGACTGGCTAAGCAAAAAAAACATGAACT | |
| | | ATGACAAAGTACAAAGTAAATGCTTAATATCAGACCTACCTCTATG | |
| | | GGCAGCAGCATATGGATATGTAGAATTTTGTGCAAAAAGTACAGGA | |
| | | GACCAAAACATACACATGAATGCCAAACTACTAATAAGAAGTCCCT | |
| | | TTACAGACCCACAACTACTAGTACACACAGACCCCACAAAAGGCTT | |
| | | TGTTCCTTACTCTTTAAACTTTGGAAATGGTAAAATGCCAGGAGGT | |
| | | AGTAGTAATGTGCCTATTAGAATGAGAGCTAAATGGTATCCAACAT | |
| | | TATTTCACCAGCAAGAAGTACTAGAGGCCTTAGCACAGTCAGGCC | |
| | | CCTTTGCATACCACTCAGACATTAAAAAAGTATCTCTGGGTATGAA | |
| | | ATACCGTTTTAAGTGGATCTGGGGTGGAAACCCCGTTCGCCAACA | |
| | | GGTTGTTAGAAATCCCTGCAAAGAAACCCACTCCTCGGGCAATAG | |
| | | AGTCCCTAGAAGCTTACAAATCGTTGACCCGAAATACAACTCACCG | |
| | | GAACTCACATTCCATACCTGGGACTTCAGACGTGGCCTGTTTGGC | |
| | | CCGAAAGCTATTCAGAGAATGCAACAACAACCAACAACTACTGACA | |
| | | TTTTTTCAGCAGGCCGCAAGAGACCCAGGAGGGACACCGAGGTGT | |
| | | ACCACTCCAGCCAAGAAGGGGAGCAAAAAGAAAGCTTACTTTTCC | |
| | | TCCCAGTCAAGCTCCTCAGACGAGTCCCCCCGTGGGAAGACTCGC | |
| | | AGCAGGAGGAAAGCGGGTCGCAAAGCTCAGAGGAAGAGACGCAG | |
| | | ACCGTCTCCCAGCAGCTCAAGCAGCAGCTGCAGCAACAGCGAATC | |
| | | CTGGGAGTCAAACTCAGACTCCTGTTCAACCAAGTCCAAAAAATCC | |
| | | AACAAAATCAAGATATCAACCCTACCTTGTTACCAAGGGGGGGGG | |
| | | ATCTGGCATCCTTATTTCAAATAGCACCATAA | |
| BAA90406.1 | AB030487.1 | ATGGCCTATGGGTGGTGGAGGAGACGCCGCAGAAGGTGGAAGAG | 166 |
| | | ATGGAGGAGAAGGCCCAGGTGGAGACGCCCATGGAGGACCCGCA | |
| | | GACGCAGACCTGCTAGACGCCGTGGACGCCGCAGAACAGTAAGG | |
| | | AGACGGGAGCGCGGGAGGTGGAGGAGGCGCTATAGGAGGTGGA | |
| | | GGAAAAAGGGCAAACGCAGGATAAAAAAGAAACTTATAATAAGACA | |
| | | GTGGCAGCCAAACTATACCAGAAAGTGCGACATATTAGGCTACAT | |
| | | GCCTGTAATCATGTGTGGAGAGAACACTCTAATAAGAAACTATGCC | |
| | | ACACACGCAAACGACTGCTACTGGCCGGGACCCTTTGGGGGCGG | |
| | | CATGGCCACCCAGAAATTCACACTCAGAATCCTGTACGATGACTAC | |
| | | AAGAGGTTTATGAACTACTGGACCTCCTCAAACGAGGACCTAGAC | |
| | | CTCTGTAGATACAGGGGAGTCACCCTGTACTTTTTCAGACACCCAG | |
| | | ATGTAGACTTTATCATCCTGATAAACACCACACCTCCGTTCGTAGA | |
| | | TACAGAGATCACAGGACCCAGCATACATCCTGGCATGATGGCCCT | |
| | | CAACAAGAGAGCCAGGTTCATCCCCAGCCTAAAAACTAGACCTGG | |
| | | CAGAAGACACATAGTAAAGATTAGAGTGGGGGCCCCCAAACTGTA | |
| | | CGAGGACAAATGGTACCCCCAGTCAGAACTCTGTGACATGCCCCT | |
| | | GCTAACCGTCTACGCGACCGCAGCGGATATGCAATATCCGTTCGG | |
| | | CTCACCACTAACTGACACTCCTGTTGTAACCTTCCAAGTGTTGCGC | |
| | | AGCATGTACAACGACGCCCTTAGCATACTTCCCTCTAACTTTGAAC | |
| | | AGGACGACAATGCAGGCCAAAAACTTTACAATGAAATATCATCATA | |
| | | TTTACCATACTACAACACCACAGAAACAATAGCACAACTAAAGAGA | |
| | | TATGTAGAAAATACAGAAAAAATTTCCACAACACCAAACCCATGGC | |
| | | AATCAAATTATGTAAACACTATTACCTTCACCACTGCACAAAGTATT | |
| | | ACAACTACAACCCCATACACCACCTTCTCAGACAGCTGGTACAGG | |
| | | GGCACAGTATACAAAAACGCAATCACTAAAGTGCCACTTGCCGCA | |
| | | GCTAAACTTTATGAAACCCAAACAAAAAACCTGCTGTCTCCAACAT | |
| | | TTACAGGAGGGTCCGAGTACCTAGAATACCATGGAGGCCTGTACA | |
| | | GCTCCATATGGCTATCAGCAGGCCGATCCTACTTTGAAACAAAGG | |
| | | GAGCATACACAGACATATGCTACAACCCCTACACAGACAGGGGAG | |
| | | AAGGGAACATGTTGTGGATAGACTGGCTATCCAAAGGAGATTCCA | |
| | | GATATGACAAAGCACGCAGCAAATGTCTAATAGAAAAACTACCTAT | |
| | | GTGGGCCGCAGTATATGGGTACGCAGAATACTGTGCAAAAGCCAC | |
| | | AGGAGACTCTAACATAGACATGAACGCCAGAGTAGTAATGAGGTG | |
| | | TCCATACACCGTACCCCAAATGATAGACACAAGCGATCCCCTCAG | |
| | | AGGCTTTATACCCTATAGCTTTAACTTTGGAAAGGGAAAAATGCCT | |
| | | GGAGGAACAAATCAAGTCCCCATAAGAATGAGAGCTAAGTGGTAC | |
| | | CCTTGTCTCTTTCACCAAAAAGAAGTTCTAGAAGCTATAGGACAGT | |
| | | CAGGCCCCTTCGCCTACCATAGTGATCAGAAAAAAGCAGTACTAG | |
| | | GCCTAAAATACAGATTTCACTGGATATGGGGTGGAAACCCCGTGTT | |
| | | TCCACAGGTTGTTAGAAACCCCTGCAAAGACACCCAAGGTTCCAC | |
| | | AGGCCCTAGAAAGCCTCGCTCAGTACAAATCATTGACCCGAAGTA | |
| | | CAACACACCAGAGCTTACCATCCACGCGTGGGATTTCAGACGTGG | |
| | | CTTCTTTGGCCCAAAAGCTATTAAAAGAATGCAACAACAACCAACA | |
| | | GATGCTGAACTTCTTCCACCAGGCCGCAAGAGGAGCAGGAGAGA | |
| | | CACCGAAGTCCTGCAAAGCAGCCAAGAAAGGCAAAAAGAAAGCTT | |
| | | ACTTTTACAACAGCTCCACCTCCAGGGACGAGTACCCCCGTGGGA | |
| | | AAGCTTGCAAGGGTTGCAGACAGAAACAGAAAGCCAAAAAGAGCA | |
| | | CGAGGGCACCCTTTCCCAGCAGATCAGAGAGCAGGTTCAGCAGC | |
| | | AGAAGCTCCTCGGGAGACAGCTCAGAGAAATGTTCTTACAACTCC | |
| | | ACAAAATCCTACAAAATCAACACGTCAACCCTACCTTATTGCCAAG | |
| | | GGATCAGGGTTTAATTTGGTGGTTTCAGATTCAGTAA | |
| BAA90409.1 | AB030488.1 | ATGGCTTATGGGTGGTGGAGGAGACGCCGCAGGAGGTGGAAGAG | 167 |
| | | ATGGAGGAGAAGGCCCAGGTGGAGACGCCCATGGAGGACCCGCA | |
| | | GACGCAGACCTGCTGGACGCCGTGGACGCCGCAGAACAGTAAGG | |
| | | AGACGGAGGCGCGGGAGGTGGAGGAGGCGCTATAGGAGGTGGA | |
| | | GGAAAAAGGGCAGACGCAGGAGAAAAAAGAAACTTATAATAAGAC | |
| | | AATGGCAGCCAAACTATACCAGAAAGTGCAACATAGTTGGTTACAT | |
| | | GCCAGTCATCATGTGTGGAGAGAACACTCTAATCAGAAACTATGCC | |
| | | ACACACGCATACAACTGCTCCTGGCCGGGACCCTTTGGGGGCGG | |
| | | CATGGCCACCCAAAAATTTACTCTGAGAATACTGTACGATGACTAC | |
| | | AAAAGATTTATGAACTACTGGACCTCCTCAAACGAGGACCTAGACC | |
| | | TGTGCAGATATAGAGGAGCTACACTGTACTTTTTCAGAGACCCAGA | |
| | | TGTAGACTTTATTATACTGATAAACACCACTCCTCCATTTGTAGACA | |
| | | CAGAGATTACAGGGCCCAGCATACATCCCGGCATGCTGGCACTCA | |
| | | ACAAGAGAGCAAGATTTATACCCAGCTTAAAGACTAGACCCAGCA | |
| | | GAAGACACATAGTAAAGATCAGAGTGGGGGCCCCCAAACTGTATG | |
| | | AGGACAAGTGGTACCCCCAGTCAGAACTTTGTGACATGCCCCTGC | |
| | | TAACCGTCTATGCGACCGCAACGGATATGCAATATCCGTTCGGCT | |
| | | CACCACTAACTGACACTCCTATTGTAACCTTCCAAGTGTTGCGCAG | |
| | | CATGTACAACGACGCCCTTAGCATACTTCCCTCTAACTTTGAAGGT | |
| | | GACGACAGTGCAGGCGCAAAACTTTACAAACAAATATCAGAATACA | |
| | | TACCATACTATAACACCACAGAAACAATAGCACAGTTAAAGGGATA | |
| | | TGTAGAAAACACAGAAAAAACCCAAACAACACCTAATCCATGGCAA | |
| | | TCAAAATATGTAAACACAAAACCATTTGACACTGCACAAACAATTAC | |
| | | AAACCAAAAGCCATACACTCCATTCGCAGACACATGGTACAGGGG | |
| | | CACAGCATACAAAGAAGAAATTAAAAATGTACCACTAAAAGCAGCC | |
| | | GAACTGTATGAATTACATACTACACACCTGTTATCTACAACATTCAC | |
| | | AGGAGGGTCCAAATACTTAGAATACCATGGAGGCTTATACAGCTC | |
| | | CATATGGCTGTCAGCAGGCCGCTCCTACTTTGAAACAAAAGGAGC | |
| | | ATACACAGACATTTGCTACAACCCCTACACAGACAGGGGAGAAGG | |
| | | CAACATGGTGTGGATAGACTGGCTAGTAAAGACAGACTCTAGATAT | |
| | | GACAAGACACGCAGCAAATGCCTTATAGAAAAACTACCTCTATGGG | |
| | | CTGCAGTATACGGGTACGCAGAGTACTGCGCCAAGGCCACAGGA | |
| | | GACTCTAACATAGACATGAACGCCAGAGTAGTTATCAGGAGCCCC | |
| | | TACACTACACCTCAAATGATAGACACCAACGACTCTCTAAGAGGCT | |
| | | TTATAGTATACAGCTTTAACTTTGGAAAGGGAAAAATGCCTGGAGG | |
| | | AACAAATCAAGTCCCCATAAGAATGAGAGCTAAGTGGTACCCTTGC | |
| | | CTCTTTCACCAAAAAGAAGTTCTAGAAGCTATAGGACAGTCAGGCC | |
| | | CCTTCGCCTACCATAGTGATCAGAAAAAAGCAGTACTAGGCCTAAA | |
| | | ATACAGATTTCACTGGATATGGGGTGGAAACCCCGTGTTTCCACA | |
| | | GGTTGTTAGAAACCCCTGCAAAGACACCCAAGGTTCCACAGGCCC | |
| | | TAGAAAGCCTCGCTCAGTACAAATCATTGACCCGAAGTACAACACA | |
| | | CCAGAGCTTACCATCCACGCGTGGGATTTCAGACGTGGCTTCTTT | |
| | | GGCCCAAAAGCTATTAAAAGAATGCAACAACAACCAACAGATGCT | |
| | | GAACTTCTTCCACCAGGCCGCAAGAAGAGCAGGAGAGACACCGAA | |
| | | GTCCTGCAAAGCAGCCAAGAAAGGCAAAAAGAAAGCTTACTTTTCC | |
| | | AACAGCTCCAGCTCCAGCGACGAGTACCCCCGTGGGAAAGCTCG | |
| | | CAAGGGTCGCAGACAGAAACAGAAAGCCAAAAAGAGCAGGAGGG | |
| | | CACCCTCTCCCAGCAGCTCAGAGAGCAGCTTCAGCAGCAGAAGCT | |
| | | CCTCGGCAGACAGCTCAGGGAAATGTTCCTACAAATCCACAAAAT | |
| | | CCTACAAAATCAACAAGTCAACCCTATTTTATTGCCAAGGGATCAG | |
| | | GCTTTAATTTCCTGGTTTCAGATTCAGTAA | |
| BAA90412.1 | AB030489.1 | ATGGCCTATGGGTGGTGGAGGAGACGCCGCAGGAGGTGGAAGAG | 168 |
| | | ATGGAGGAGAAGGCCCAGGTGGAGACGCCGCTGGAGGACCCGC | |
| | | AGACGCAGACCTGCTGGACGCCGTAGACGCCGCAGAACAGTAAG | |
| | | GAGACGCAGGCGCGGGAGGTGGAGGAGCAGATATAGGAGATGGA | |
| | | GGCGAAAGGGCAGACGCAGGCGAAAAGAAAAACTAATAATAAGAC | |
| | | AATGGCAGCCAAACTATACCAGAAAGTGCAACATTGTGGGTTACAT | |
| | | GCCAGTAATCATGTGTGGAGAAAATACTGTTATCAGAAACTATGCC | |
| | | ACACACACATACGACTGCTCCTGGCCAGGACCCTTTGGGGGCGG | |
| | | CATGGCCACCCAAAAATTTACTCTGAGAATACTGTACGATGACTAC | |
| | | AAAAGATTTATGAACTACTGGACCTCCTCAAACGAGGACCTAGATC | |
| | | TCTGCAGATACAGAGGAGCAACCCTATACTTTTTCAGAGACCCAGA | |
| | | TGTAGACTTTATTATACTTATAAACACTACTCCTCCATTTGTAGACA | |
| | | CAGAAATAACAGGGCCCAGCATACACCCAGGCATGCTGGCACTAA | |
| | | ACAAAAGAGCTAGATTCATTCCCAGTCTAAAAACCAGACCAGGCAG | |
| | | GAGACACATAGTAAAAATAAAAGTAGGGGCCCCTAGAATGTATGAA | |
| | | GACAAGTGGTACCCCCAGTCAGAACTTTGTGACATGCCCCTCCTA | |
| | | ACGATCTATGCAACCGCAACGGATATGCAACATCCGTTCGGCTCA | |
| | | CCACTAACTGACACTCCTGTTGTAACCTTCCAAGTGTTGCGCAGCA | |
| | | TGTACAACGACGCCCTTAGCATACTTCCCTCTAACTTTGAAGACGA | |
| | | TTCAAGTCCAGGGGCTGCACTTTACAAACAAATATCAGAATACATA | |
| | | CCATACTATAACACCACAGAAACAATAGCACAGCTAAAGAGATATG | |
| | | TAGAAAACACAGAAAAAACCCAAACAACACTTAATCCATGGCAATC | |
| | | AAGATATGTAAACACAACACTATTTAACACTGCAGAAACAATTGCA | |
| | | AACCAAAAGCCATACACTAAATTCGCAGACACATGGTACAGGGGC | |
| | | ACAGCATACAAAGACGCAATTAAAGACATACCACTAAAAGCAGCC | |
| | | GAATTGTATGTAAACCAAACCAAATACCTGTTATCTACAACATTCAC | |
| | | AGGAGGGTCCAAATACTTAGAATACCATGGAGGCTTATACAGCTC | |
| | | CATATGGCTGTCAGCAGGCCGCTCCTACTTTGAAACAAAAGGAGC | |
| | | ATACACAGACATTTGCTACAACCCCTACACAGACAGGGGAGAAGG | |
| | | CAACATGGTGTGGATAGACTGGCTATCGAAAACAGACTCAAAATAT | |
| | | GACAAGACCCGCAGCAAATGCCTTATAGAAAAACTGCCGCTATGG | |
| | | GCATCGGTATACGGGTACGCAGAATACTGTGCCAAGGCCACAGGA | |
| | | GACTCTAACATAGACATGAACGCCAGAGTAGTTATAAGATGCCCCT | |
| | | ACACTACACCTCAAATGATAGACACCACCGACCCAACTAGAGGGT | |
| | | TCATAGTATACAGCTTTAACTTTGGTAAGGGCAAAATGCCGGGAGG | |
| | | TAGCAATGAAGTACCCATAAGAATGAGAGCCAAATGGTACCCCTG | |
| | | CCTCTTTCACCAAAAAGAGGTCCTAGAAGCCATAGGCCAGTCAGG | |
| | | CCCCTTTGCTTATCACAGCGATCAAAAAAAAGCAGTTTTAGGTTTA | |
| | | AAATACAAATTTCACTGGATATGGGGTGGAAACCCCGTGTTCCCAC | |
| | | AGGTTATTAAAAACCCCTGCAAAAACACTCAATTTTCCACAGGCCC | |
| | | TAGAAAGCCTCGCTCATTACAAATCATTGACCCGAATTACAACACA | |
| | | CCAAAGCTTACCATCCACGCTTGGGATTTCAGACTTGGCTTCTTTG | |
| | | GCCCAAAAGCTATTAAAAGAATGCAACAACAACCAACAGATGCTGA | |
| | | ACTTCTTCCACCAGGCCGCAAGAGGAGCAGGAGAGACACCGAAG | |
| | | TCCTGCAAAGCAGCCAAGAAAGGCAAAAAGGAAACTTACTTTTCCA | |
| | | ACAGTTCCAGCTCCAGCGACGAGTACCCCCGTGGGAAAGCTCGC | |
| | | AAGGGTCGCAGACAGGAACACAAAGCCAAAAAGAGCAGGAGGGC | |
| | | ACCCTCTCCCAGCAGCTCAGAGAGCAGCTTCAGCAGCAGAAGCTC | |
| | | CTCGGCAGACAGCTCAGGGAAATGTTCCTACAACTCCACAAAATC | |
| | | CAACAAAATCAACACGTCAACCCTACCTTATTGCCAAGGGATCAGG | |
| | | CTTTAATTTGCTGGTTTCAGATTCAGTAA | |
| BAA90825.1 | AB038340.1 | ATGGCCTATGGCTGGTGGCGCCGAAGGAGAAGACGGTGGCGCAG | 169 |
| | | GTGGAGACGCAGACCATGGAGGCGCCGCTGGAGGACCCGAAGAC | |
| | | GCAGACCTGCTAGACGCCGTGGCCGCCGCAGAAACGTAAGGAGA | |
| | | CGCCGCAGAGGAGGGAGGTGGAGGAGGAGATATAGGAGATGGAA | |
| | | AAGAAAGGGCAGGCGCAGAAAAAAAGCTAAAATAATAATAAGACA | |
| | | ATGGCAACCAAACTACAGAAGGAGATGTAACATAGTAGGCTACATC | |
| | | CCTGTACTAATATGTGGCGAAAATACTGTCAGCAGAAACTATGCCA | |
| | | CACACTCAGACGATACTAACTACCCAGGACCCTTTGGGGGGGGTA | |
| | | TGACTACAGACAAATTTACTTTAAGAATTCTGTATGACGAGTACAAA | |
| | | AGGTTTATGAACTACTGGACAGCATCTAACGAAGACCTAGACCTTT | |
| | | GTAGATATCTAGGAGTAAACCTATACTTTTTCAGACACCCAGATGT | |
| | | AGATTTTATTATAAAAATTAATACCATGCCTCCTTTTCTAGACACAG | |
| | | AACTCACAGCCCCTAGCATACACCCAGGCATGCTAGCCCTAGACA | |
| | | AAAGAGCAAGATGGATACCTAGCTTAAAATCTAGACCAGGAAAAAA | |
| | | ACACTATATTAAAATAAGAGTAGGGGCACCAAAAATGTTCACTGAT | |
| | | AAATGGTACCCCCAAACAGATCTTTGTGACATGGTGCTTCTAACTG | |
| | | TCTATGCAACCGCAGCGGATATGCAATATCCGTTCGGCTCACCAC | |
| | | TAACTGACTCTGTGGTTGTGAACTTCCAGGTTCTGCAATCCATGTA | |
| | | TGATGAAAAAATTAGCATATTACCAGACCAAAAATCACAAAGAGAA | |
| | | AGCCTACTTACTAGCATAGCAAATTACATTCCCTTTTATAATACCAC | |
| | | ACAAACTATAGCCCAATTAAAGCCATTTATAGATGCAGGCAATGTA | |
| | | ACATCAGGCACAACAGCAACAACATGGGGGTCATACATAAACACA | |
| | | ACCAAGTTTACTACAACAGCCACAACAACTTATACATATCCAGGCA | |
| | | CCACCACAACCACAGTAACTATGTTAACCTCTAATGACTCCTGGTA | |
| | | CAGAGGAACAGTATATAACAACCAAATTAAAGACTTACCAAAAAAA | |
| | | GCAGCTGAATTATACTCAAAAGCAACAAAAACCTTGCTAGGAAACA | |
| | | CCTTCACAACTGAAGACTACACACTAGAATACCATGGAGGACTGTA | |
| | | CAGCTCAATATGGCTATCCCCTGGTAGATCTTACTTTGAAACACCA | |
| | | GGAGCATATACAGACATAAAGTACAATCCATTTACAGACAGAGGAG | |
| | | AAGGCAACATGTTATGGATAGACTGGCTAAGCAAAAAAAACATGAA | |
| | | CTACGACAAAGTACAGAGTAAATGCTTAATATCAGACCTACCTCTA | |
| | | TGGGCAGCAGCATATGGATATGTAGAATTTTGTGCAAAAAGTACAG | |
| | | GAGACCAGAACATACACATGAATGCCAGGCTACTAATAAGAAGTC | |
| | | CCTTTACAGACCCACAACTACTAGTACACACAGACCCCACAAAAGG | |
| | | CTTTGTTCCTTACTCTTTAAACTTTGGAAATGGTAAAATGCCAGGAG | |
| | | GTAGTAGTAATGTGCCTATTAGAATGAGAGCTAAATGGTATCCAAC | |
| | | ATTATTTCACCAGCAAGAAGTACTAGAGGCCTTAGCACAGTCAGGC | |
| | | CCCTTTGCATACCACTCAGACATTAAAAAAGTATCTCTGGGTATGA | |
| | | AATACCGTTTTAAGTGGATCTGGGGTGGAAACCCCGTTCGCCAAC | |
| | | AGGTTGTTAGAAATCCCTGCAAAGAAACCCACTCCTCGGGCAATA | |
| | | GAGTCCCTAGAAGCTTACAAATCGTTGACCCGAAATACAACTCACC | |
| | | GGAACTCACATTCCATACCTGGGACTTCAGACGTGGCCTCTTTGG | |
| | | CCCGAAAGCTATTCAGAGAATGCAACAACAACCAACAACTACTGAC | |
| | | ATTTTTTCAGCAGGCCGCAAGAGACCCAGGAGGGACACCGAGGT | |
| | | GTACCACTCCAGCCAAGAAGGGGAGCAAAAAGAAAGCTTACTTTT | |
| | | CCCCCCAGTCAAGCTCCTCAGACGAGTCCCCCCGTGGGAAGACT | |
| | | CGCAGCAGGAGGAAAGCGGGTCGCAAAGCTCAGAGGAAGAGACG | |
| | | CAGACCGTCTCCCAGCAGCCCAAGCAGCAGCTGCAGCAACAGCG | |
| | | AATCCTGGGAGTCAAACTCAGACTCCTGTTCAACCAAGTCCAAAAA | |
| | | ATCCAACAAAATCAAGATATCAACCCTACCTTGTTACCAAGGGGGG | |
| | | GGGATCTAGCATCCTTATTTCAAGTAGCACCATAA | |
| BAA93586.1 | AB038622.1 | ACGGCTTGGTGGTGGGGCAGATGGAGGCGCCGCTGGAGGCCTC | 170 |
| | | GCTATCGCAGACGCACCTGGAGGGTACGAAGAAGACGACCTAGA | |
| | | CGAACTTTTCGCCGCCGCCGCCGAGGACGATATGTGAGTAGGCG | |
| | | GAGGCGCCGCCGCTACTACAGGCGCAGACTGAGACGGGGCAGAC | |
| | | GCAGAGGGCGACGAAAGAGACACAGACAGACTCTAGTCCTCAGA | |
| | | CAGTGGCAACCAGACATTGTCAGACACTGTAAAATTACAGGATGG | |
| | | ATGCCCCTTATCATCTGTGGCTCAGGGAGCACACAGAACAATTTTA | |
| | | TAACTCACATGGACGACTTTCCTCCCATGGGCTACTCCTTCGGGG | |
| | | GCAACTTTACAAACCTCTCCTTCTCCTTAGAGGGCATTTATGAACA | |
| | | ATTTCTGTACCACAGAAACAGGTGGTCTCGCTCCAACCATGACCTA | |
| | | GACCTAGCCAGATACAAAGGCACAACTCTAAAACTCTACAGACACC | |
| | | ACACCTTAGACTACATAGTCAGCTACAACAGAACAGGCCCTTTCCA | |
| | | GATCAGTGACATGACCTACCTCAGCACACACCCTGCACTCATGCT | |
| | | ACTCCAGAAACACAGAATAGTAGTACCCAGCCTACTCACTAAACCT | |
| | | AAAGGCAAGAGATCCATAAAAGTTAGAATAAAGCCACCAAAACTCA | |
| | | TGCTCAACAAATGGTACTTCACCAAAGACATATGCAGCATGGGCCT | |
| | | CTTCCAACTACAGGCCACAGCATGCACCCTATACAACCCCTGGCT | |
| | | CAGAGACACCACAAAAAGCCCAGTCATAGGCTTCAGAGTACTTAAA | |
| | | AACAGTATTTATACAAACCTCAGCAACCTACCAGAACATGATCAAA | |
| | | CCAGACAAGCCATTAGACGAAAACTACACCCAGACTCCTTAACAG | |
| | | GATCAACTCCATATCAAAAAGGCTGGGAATACAGCTACACAAAACT | |
| | | AATGGCTCCAATATACTATCAAGCAAATAGAAACAGCACATACAAC | |
| | | TGGCTAAATTATCAAACAAACTATGCTCAAACATTCACCAAATTTAA | |
| | | AGAAAAAATGAATGAAAACCTTGCACTAATTCAAAAAGAGTATTCAT | |
| | | ACCACTATCCCAACAATGTCACTACAGACCTTATTGGCAAAAACAC | |
| | | CCTCACACATGACTGGGGTATATACAGTCCCTACTGGCTAACACC | |
| | | CACCAGAATAAGCCTAGACTGGGAAACACCCTGGACATATGTCAG | |
| | | ATACAATCCACTAGCAGACAAGGGCATAGGCAATGCTGTCTATGC | |
| | | ACAATGGTGCTCAGAACAGACCAGTAAATTAGATACAAAAAAGAGC | |
| | | AAGTGCATAATGAAAGACCTGCCACTGTGGTGCATATTTTATGGCT | |
| | | ATGTAGATTGGATAATAAAATCCACAGGAGTCAGCAGCGCAGTCA | |
| | | CTGACATGAGAGTAGCCATCATCAGCCCCTACACCGAACCAGCAC | |
| | | TTATAGGGTCAAGTCCAGACGTAGGCTACATTCCAGTAAGTGACAC | |
| | | CTTTTGCAATGGAGACATGCCGTTTCTTGCTCCATACATCCCTGTG | |
| | | GGCTGGTGGATCAAATGGTACCCTATGATTGCACACCAAAAGGAA | |
| | | GTGTTTGAGGCAATAGTTAACTGTGGACCGTTTGTGCCCAGAGAC | |
| | | CAGACCACTCCCAGTTGGGAAATTACCATGGGTTACAAAATGGACT | |
| | | GGTTATGGGGTGGCTCTCCCCTGCCTTCACAGGCAATCGACGACC | |
| | | CCTGCCAGAAGCCCACCCACGAACTACCCGATCCCGATAGACACC | |
| | | CTCGCATGTTACAAGTCTCTGACCCGACAAAGCTCGGACCGAAGA | |
| | | CAGTGTTCCACAAATGGGACTGGAGACGTGGGATGCTTAGCAAAA | |
| | | GAAGTATTAAAAGAGTCCAGGAGGACTCAACAGATGATGAATATGT | |
| | | TGCAGGGCCTTTACCAAGAAAAAGAAACAAATTCGATACCAGAGC | |
| | | CCAAGGGCTGCAAACCCCCGAAAAAGAAAGCTACACTTTACTCCA | |
| | | AGCCCTCCAAGAGTCGGGGCAAGAGACCAGCTCAGAAGACCAAG | |
| | | AACAAGCACCCCAAGAAAAAGAGGGTCAGAAGGAAGCGCTCATG | |
| | | GAGCAGCTCCAGCTCCAGAAACAGCACCAGCGAGTCCTCAAGCG | |
| | | AGGCCTCAAACTCCTCCTCGGAGACGTCCTCCGACTCCGGAGAG | |
| | | GAGTCCACTGGGACCCCCTCCTGTCATAA | |
| BAA93589.1 | AB038623.1 | ACGGCGTGGTGGTGGGGCAGATGGAGGCGTCGATGGAGGCCTC | 171 |
| | | GCTATCGCAAACGCACCTGGAGATTACGGAGACGACGACCTAGAC | |
| | | GAACTTTTCGCCGCCGCCGCCGAAGACAATATGTGAGTAGGCGGA | |
| | | GGCGCCGCCGCTACTACAGGCGCAGACTGAGACGGGGCAGACG | |
| | | CAGAGGGCGACGAAAGAGACACAGACAGACTCTAGTCCTCAGACA | |
| | | ATGGCAACCAGACGTTGTTAGACACTGTAAAATTACAGGATGGATG | |
| | | CCCCTTATCATCTGTGGCTCCGGGAGCACACAGAACAATTTTATAA | |
| | | CTCACATGGACGACTTTCCTCCCATGGGCTACTCCTTTGGGGGCA | |
| | | ACTTTACAAACCTCACCTTCTCCTTAGAGGGCATATATGAACAATTT | |
| | | CTGTACCACAGAAACAGGTGGTCTCGCTCCAACCATGACCTAGAC | |
| | | CTAGCCAGATACAAAGGCACAACTCTAAAACTCTACAGACACCACA | |
| | | CCTTAGACTACATAGTCAGCTACAACAGAACAGGCCCCTTCCAGAT | |
| | | CAGTGACATGACCTACCCCAGCACACACCCTGCACTTATGCTACT | |
| | | CCAGAAACACAGAATAGTAGTGCCCAGCGTACTCACTAAACCTAAA | |
| | | GGCAAGAGATCCATAAAGGTCAGAATAAAGCCACCAAAACTCATG | |
| | | CTTAACAAGTGGTACTTCACCAAAGACATATGCAGCATGGGCCTTT | |
| | | TTCAACTACAGGCCACAGCATGCACCCTATACAATCCCTGGCTCA | |
| | | GAGACACCACAAAAAGCCCAGTCATAGGCTTCAGGGTACTTAAAA | |
| | | ACAGTATCTATACAAACCTCAGCAACCTACCAGACCATGAGGGTTC | |
| | | CAGAGAAGCCATAAGAAAAAAACTACACCCACAATCCTTAACAGGA | |
| | | CACTCTCCCAACCAAAAAGGCTGGGAATACAGCTATACTAAACTAA | |
| | | TGGCTCCAATATACTACTCTGCCAACAGAAACAGTACATATAACTG | |
| | | GCTAAACTATCAAGACAACTATGTAGCCACATATACTAAATTCAAAG | |
| | | TCAAAATGACAGACAACTTACAACTAATACAAAAAGAATACTCATAC | |
| | | CACTATCCCAACAATACCACTACAGACCTTATTAAGAACAACACCC | |
| | | TTACACATGACTGGGGCATATACAGTCCCTACTGGCTAACACCCAC | |
| | | CAGAATAAGCCTAGACTGGGAAACACCCTGGACATATGTAAGATA | |
| | | CAACCCACTGGCAGACAAAGGCATAGGCAATGCTGTCTACGCACA | |
| | | GTGGTGCTCAGAACAGACAAGCAAATTAGACCCAAAAAAGAGCAA | |
| | | GTGCATAATGAGAGACCTGCCACTGTGGTGCATATTTTATGGCTAT | |
| | | GTAGATTGGATAGTAAAATCCACAGGAGTCAGCAGCGCAGTCACT | |
| | | GACATGAGAGTAGCCATTAGAAGCCCCTACACTGAACCAGCACTT | |
| | | ATAGGGTCAACTGAAGATGTAGGCTTCATTCCAGTAAGTGACACCT | |
| | | TTTGCAACGGAGACATGCCGTTTCTTGCTCCATACATTCCTGTGGG | |
| | | CTGGTGGATCAAGTGGTACCCCATGATTGCACACCAAAAGGAAGT | |
| | | GTTTGAGCAAATAGTAAACTGTGGACCGTTTGTGCCCAGAGACCA | |
| | | GACCACTCCCAGTTGGGAAATTACCATGGGTTACAAAATGGACTG | |
| | | GTTATGGGGTGGCTCTCCCCTGCCTTCACAGGCAATCGACGACCC | |
| | | CTGCCAGAAGCCCACCCACGAACTACCCGATCCCGATAGACACCC | |
| | | TCGCATGTTACAAGTCTCTGACCCGACAAAGCTCGGACCGAAGAC | |
| | | AGTGTTCCACAGATGGGACTGGAGACGTGGGATGCTTAGCAAAAG | |
| | | AAGTATTAAAAGAGTCCAGGAGGACTCAACAGATGATGAATATGTT | |
| | | GCAGGGCCTTTACCAAGAAAAAGAAACAAGTTCGATACCAGAGCC | |
| | | CAAGGGCTCCAAAGCCCCGAAAAAGAAAGCTACACTTTACTCCAA | |
| | | GCCCTCCAAGAGTCGGGGCAAGAGAGCAGCTCAGAAGACCAAGA | |
| | | ACAAGCACCCCAAGAAAAAGAGGGTCAGAAGGAAGCGCTCATGG | |
| | | AGCAGCTCCAGCTCCAGAAACAGCACCAGCGAGTCCTCAAGCGA | |
| | | GGCCTCAAACTCCTCCTCGGAGACGTTCTCCGACTCCGGAGAGGA | |
| | | GTACACTGGGACCCCCTCCTGTCATAA | |
| BAA93592.1 | AB038624.1 | ACGGCGTGGTGGTGGGGCAGATGGAGGCGCCGCTGGAGGCCTC | 172 |
| | | GCTATCGCAGACGCACCTGGAGGGTACGCAGAAGACGACCTAGA | |
| | | CGAACTTTTCGCCGCCGCCGCCGAGGACGATATGTGAGTAGGCG | |
| | | GAGGCGCCGCCGCTACTACAGGCGCAGACTCAGACGGGGCAGAC | |
| | | GCAGAGGGCGACGAAAGAGACACAGACAGACTCTAGTCCTCAGA | |
| | | CAATGGCAACCAGACGTTCTTAGACGCTGTAAAATTACAGGATGGA | |
| | | TGCCCCTTATCATCTGTGGCTCCGGAAGCACACAGAACAATTTTAT | |
| | | AACTCACATGGACGACTTTCCTCCCATGGGCTACTCCTACGGGGG | |
| | | CAACTTTACAAACCTCACCTTCTCCTTAGAGGGCATATATGAACAA | |
| | | TTTCTGTACCACAGAAACAGGTGGTCTCGCTCCAACCATGACCTAG | |
| | | ACCTAGCCAGATACAAAGGCACAACTCTAAAACTCTACAGACACCA | |
| | | CACCTTAGACTACATAGTGAGCTACAATAGAACAGGCCCTTTCCAG | |
| | | ATCAGTGACATGACCTACCTCAGCACACACCCTGCACTTATGCTAC | |
| | | TCCAGAAACACAGAATAGTAGTGCCCAGCCTACTCACTAAACCTAA | |
| | | AGGCAAGAGATCCATAAAAGTTAGAATAAAACCACCAAAACTCATG | |
| | | CTTAACAAGTGGTACTTCACCAAAGACATATGCAGCATGGGCCTTT | |
| | | TTCAACTACAGGCCACAGCATGCACCCTATACAACCCCTGGCTCA | |
| | | GAGACACCACAAAAAGCCCAGTCATAGGCTTCAGGGTACTTAAAA | |
| | | ACAGTATTTATACAAACCTCAGCAACCTACCAGACCATGAAGGAGC | |
| | | CAGAGAGGCCATAAGAAAAAAACTACACCCACAATCCTTAACAGG | |
| | | ATCTGTCCCAAACCAAAAAGGTTGGGAATACAGCTACACAAAACTA | |
| | | ATGGCTCCCATTTACTACCAAGCCATTAGAAACAGCACATACAACT | |
| | | GGCTAAACTATCAACAAAATTACTCACAAACATACCAAACCTTTAAA | |
| | | CAAAAAATGCAAGACAACTTACAACTAATACAAAAAGAATACATGTA | |
| | | CCACTACCCAAACAATGTAACAACAGACATACTAGGCAAAAACACA | |
| | | CTTACACATGACTGGGGCATATACAGTCCCTACTGGCTAACACCCA | |
| | | CCAGAATCAGCCTAGACTGGGAAACACCTTGGACATATGTTAGATA | |
| | | CAATCCACTAGCAGACAAGGGCATAGGCAATGCTGTCTATGCACA | |
| | | GTGGTGCTCAGAACAGACCAGTAACTTAGATACAAAAAAGAGCAA | |
| | | GTGCATAATGAAAGACCTGCCACTGTGGTGCATATTTTATGGCTAT | |
| | | GTAGATTGGGTAGTAAAATCCACAGGCGTCAGCAGCGCAGTGACT | |
| | | GACATGAGAGTAGCCATCATTAGCCCCTACACTGAACCAGCACTTA | |
| | | TAGGGTCAAGTCCAGAGGTAGGCTACATTCCAGTAAGTGACACCT | |
| | | TTTGCAATGGAGACACGCCGTTTCTTGCTCCATACATCCCTGTGGG | |
| | | CTGGTGGATCAAGTGGTACCCCATGATTGCACACCAAAAGGAAGT | |
| | | GTTTGAGGCAATAGTAAACTGTGGACCGTTTGTGCCCAGAGACCA | |
| | | GACCACTCCCAGTTGGGAAATTACCATGGGTTACAAAATGGACTG | |
| | | GTTATGGGGTGGCTCTCCCCTGCCTTCACAGGCAATCGACGACCC | |
| | | CTGCCAGAAGCCCACCCACGAACTACCCGATCCCGATAGACACCC | |
| | | TCGCATGTTACAAGTCTCTGACCCGACAAAGCTCGGACCGAAGAC | |
| | | AGTGTTCCACAAATGGGACTGGAGACGTGGGATGCTTAGCAAAAG | |
| | | AAGTATTAAAAGAGTCCAGGAGGACTCAACAGATGATGAATATGTT | |
| | | GCAGGGCCTTTACCAAGAAAAAGAAACAAGTTCGATACCAGAGCC | |
| | | CAAGGGCTCCAAAGCCCCGAAAAAGAAAGCTACACTTTACTCCAA | |
| | | GCCCTCCAAGAGTCGGGGCAAGAGACGAGCTCAGAAGACCAAGA | |
| | | ACAAGCACCCCAAGAAAAAGAGGGTCAGAAGGAAGCGCTCATGG | |
| | | AGCAGCTCCAGCTCCAGAAACAGCACCAGCGAGTCCTCAAGCGA | |
| | | GGCCTCAAACTCCTCCTCGGAGACGTTCTCCGACTCCGGAGAGGA | |
| | | GTACACTGGGACCCCCTCCTGTCATAA | |
| AAF71533.1 | AF254410.1 | ATGGCACAGGGGAGGCGCAGATACAGACGGGGTTGGCAACGCAG | 173 |
| | | GGTGTATCTGAGACGCAGGAGACGCAGGAGACGAAAGAGACTTG | |
| | | TACTGACTCAGTGGCACCCCGCAGTTAGGAGAAAATGCACCATCA | |
| | | CGGGGTACATGCCCGTGGTGTGGTGCGGACACGGCAGGGCCAG | |
| | | CTACAACTACGCCTGGCATTCAGATGACTGTATAAAACAGCCCTGG | |
| | | CCCTTTGGAGGGTCTCTGTCCACCGTGTCCTTTAACCTTAAAGTAC | |
| | | TGTATGACGAAAACCAGAGGGGACTTAACAGATGGACGTACCCCA | |
| | | ACGATCAGCTAGACCTCGGCCGCTACAAGGGCTGCAAACTAACAT | |
| | | TCTACAGAACCAAAAATACCAACTACCCAGGACCCTTTGGGGGGG | |
| | | GTATGACTACAGACAAATTTACTTTAAGAATTCTGTATGACGAGTAC | |
| | | AAAAGGTTTATGAACTACTGGACAGCATCTAACGAAGACCTAGACC | |
| | | TTTGTAGATATTTAGGAGTAAACCTGTACATTTTCAGACACCCAGAT | |
| | | GTAGATTTTATCATAAAAATTAATACCATGCCTCCTTTTCTAGACAC | |
| | | AGAAATCACAGCCGCTAGCATACACCCAGGCATACTAGCCCTAGA | |
| | | CAAAAGAGCAAGATGGATACCTAGCTTAAAATCTAGACCAGGAAAA | |
| | | AAACACTATATTAAAATAAGAGTAGGGGCACCAAAAATGTTCACTG | |
| | | ATAAATGGTACCCCCAAACAGATCTCTGTGACATGGTGCTTCTAAC | |
| | | TATCTATGCAACCGCAGCGGATATGCAATATCCGTTCGGCTCACCA | |
| | | CTAACTGACACTGTGGTTGTGAACTTCCAGGTTCTGCAATCCATGT | |
| | | ATGATGAAAACATTAGCATATTACCAGACCAAAAGACACAAAGAGA | |
| | | GAAACTACTTACTAGCATATCAAACTACATTCCCTTTTATAATACCA | |
| | | CACAAACTATAGCCCAATTGAAGCCATTTGTAGATGCAGGCAATAA | |
| | | AGTATCAGGCACAACAACAACAACATGGGCATCATACATAAACACA | |
| | | ACCAGATTTACTACAACAGCCACAACAACTTATACATATCCAGGCT | |
| | | CTACCACTAACACAGTAACTATGTTAACCTCTAATGACTCCTGGTA | |
| | | CAGAGGAACAGTATATAACAATCAAATTAAAAACTTACCAAAACAA | |
| | | GCAGCTGAATTATACTCAAAAGCAACAAAAACCTTGCTAGGAAACA | |
| | | CCTTCACAACTGAAGACTACACACTAGAATACCATGGAGGACTGTA | |
| | | CAGCTCAATATGGCTATCCCCTGGTAGATCTTACTTTGAAACACCA | |
| | | GGAGCATACACAGATATAAAGTACAATCCATTTACAGACAGAGGAG | |
| | | AAGGCAACATGTTATGGATAGACTGGCTAAGCAAAAAAAACATGAA | |
| | | CTATGACAAAGTACAAAGTAAATGCTTAGTATCAGACCTACCTCTAT | |
| | | GGGCAGCAGCATATGGATATGTAGAATTTTGTGCAAAAAGTACAG | |
| | | GAGACCAGAACATACACATGAATGCCAGGCTACTAATAAGAAGTC | |
| | | CCTTTACAGACCCACAGCTACTAGTACACACAGACCCCACAAAAG | |
| | | CCTTTGTTCCCTACTCTTTAAACTTTGGAAATGGTAAAATGCCAGG | |
| | | AGGTAGTAGTAATGTGCCTATTAGAATGAGAGCTAAATGGTATCCC | |
| | | ACTTTATTCCACCAACAAGAAGTTCTAGAGGCTTTAGCGCAGTCAG | |
| | | GACCCTTCGCTTATCACTCAGACATTAAAAAAGTATCTCTAGGCAT | |
| | | AAAATACCGTTTTAAGTGGATCTGGGGTGGAAACCCCGTTCGCCA | |
| | | ACAGGTTGTTAGAAATCCCTGCAAGGAACCCCACTCCTCGGGCAA | |
| | | TAGAGTCCCTAGAAGCATACAAATCGTTGACCAGAAATACAACTCA | |
| | | CCGGAACTTACCATCCATTCCTGGGACTTCAGACGTGGCTTCTTTG | |
| | | GCCCGAAAGCTATTCAAAGAATGCAACAACAACCAACTGCTACTGA | |
| | | ATTTTTTTCAGCAGGCCGCAAGAGACCCAGAAGGGACACAGAAGT | |
| | | ATATCAGTCCGACCAAGAAAAGGAGCAAAAAGAAAGCTCGCTTTTC | |
| | | CCCCCAGTCAAGCTCCTCCGAAGAGTCCCCCCGTGGGAGGACTC | |
| | | GGACAGGAAGCAAAGCGGGTCGCAAAGCTCAGAGGAAGAGACGC | |
| | | AGACCGTCTCCCAGCAGCTCAAGCAGCAGCTGCAGCAACAGCGA | |
| | | ATCCTGGGAGTCAAACTCAGACTCCTGTTCTACCAAATCCAAAGAA | |
| | | TCCAACAAAATCAAGATATCAACCCTACCTTGTTACCAAGGGGGGG | |
| | | GGATCTAGCATCCTTATTTCAAATAGCATAA | |
| BAB19928.1 | AB050448.1 | ATGGCGTGGACCTGGTGGTGGCAGAGGAGGCGCCGAAGGTGGC | 174 |
| | | CGTGGAGAAGGAGAAGGTGGAGAAGACTACGCACAAGAAGACCT | |
| | | AGACGCCTTGTTCGACGCCGTCGCAAGAGATACAGAGTAAGGAGA | |
| | | CGGAGGCGGTGGGGAAGGAGACGTGGGCGACGCACATACCTTAG | |
| | | ACGCGGACTTAAAAAGAGAAAAAGGAGAAAAAAACTCAGACTGAC | |
| | | TCAGTGGAACCCTAGCACAATTAGGGGATGTACAATTAAGGGAAT | |
| | | GGCGCCCCTAATAGTGTGCGGCCACACCATGGCTGGCAATAACTT | |
| | | TGCCATCCGAATGGAGGACTATGTATCTCAGATTAAACCGTTCGGA | |
| | | GGGTCCTTCAGTACCACCACCTGGAGCTTAAAAGTACTGTGGGAC | |
| | | GAGCACACCAGATTCCACAACACCTGGAGCTACCCAAACACTCAG | |
| | | CTAGACTTAGCCAGGTTCAAAGGAGTAACCTTCTACTTCTACAGAG | |
| | | ACAAAGACACAGACTTTATTATAACCTATAGCTCCGTGCCACCTTTT | |
| | | AAAATAGACAAATACTCCTCAGCCATGCTACACCCAGGCATGCTTA | |
| | | TGCAGAGAAAAAAGAAGATATTATTACCCAGCTTTACAACCAGACC | |
| | | TAGGGGCAGAAAAAAAGTTAAAGTACACATAAAACCTCCTGTCTTA | |
| | | TTTGAAGACAAATGGTACACCCAGCAGGACCTGTGCGACGTTAAT | |
| | | CTTTTGTCACTTGCGGTTTCTGCGGCTTCCTTTAGACATCCGTTCT | |
| | | GCCCACCACAAACTGACAACATTTGCATAACCTTCCAGGTGTTGAA | |
| | | AGACAAGTATTACACACAAATGTCAGTTACACCAGATACCGCAGGT | |
| | | ACAAAAAAAGACGACGAAATTCTTGACCACTTATACTCAACTGCAG | |
| | | AATACTATCAAACTGTTCACACACAAGGAATAATTAACAAAACACAA | |
| | | AGAGTAGCTAAATTCTCCACCTCTAATAATACCCTAGGTGACCAAA | |
| | | GTGAGATATCATTATATTTAAACCAACCAACAACAACTAACATAGGA | |
| | | AACACGTTATCCACAGGCCATAACTCAGTGTATGGCTTTCCATCAT | |
| | | ACAACCCACAAAAAGACAAACTTAGAAAAATAGCAGACTGGTTTTG | |
| | | GACACAGGAAGCCAACAAAGAGAATGTAGTTACAGGCTCATACTC | |
| | | AATGCCTACTAACAAAGCAGTAGGCTATCACCTAGGAAAATATAGC | |
| | | CCTATATTCCTAAGTTCATACAGAACCAACCTACAATTTAGAACAGC | |
| | | ATACACAGACGTTACATACAACCCACTAAATGACAAAGGTAAAGGC | |
| | | AATGAAATTTGGGTACAATATGTAACAAAACCAGACACTGTGTTCA | |
| | | ACCCCACACAGTGTAAATGCCATGTAATAGATTTACCCTTGTGGTC | |
| | | AGCATTCCATGGATACATAGACTTTGTACAAAGTGAACTAGGAATT | |
| | | CAAGAAGAAATACTAAACATTGCCATTATAGTAGTTATATGTCCATA | |
| | | CACAAAACCTAAACTAGTACATGAGACAAACCCAAAACAAGGCTTT | |
| | | GTATTCTATGACACTCAATTTGGAGACGGTAAAATGCCAGAGGGCT | |
| | | CAGGCCTAGTACCGATATACTACCAAAACAGATGGTATCCTAGAAT | |
| | | AAAGTTTCAGAGTCAAGTAGTGCATGACTTTATACTAACAGGCCCC | |
| | | TTTAGCTACAAAGATGACCTAAAAAGCACAGTACTAACAGTAGAAT | |
| | | ACAAGTTCAAATTCTTATGGGGCGGCAATATGATTCCCGAACAGGT | |
| | | TATCAGAAACCCTTGTAAAACAGAAGGACACGATCTCCCTCACACC | |
| | | AGTAGACTCCATCGCGACTTACAAGTTGTTGACCCACACACCGTG | |
| | | GGCCCCCAATGGGCGCTCCACACCTGGGACTGGCGACGTGGACT | |
| | | CTTTGGTTCAGAGGCTATCAAAAGAGTGTCTGAACAACAAGTACAT | |
| | | GATGAACTGTATTACCCACCTTCAAAGAAACCTCGATTCCTCCCTC | |
| | | CAATATCAGGCCTCCAAGAGCAAGAAAGAGACTACAGTTCGCAGG | |
| | | AGGAGAAAGAACAGTCCTCCTCAGAAGAAGAGACGGACCCGAAG | |
| | | AAAAAAGAGCAAAAACAGCAGCAGCGACTCCACCTCCAGTTCCAA | |
| | | GAGCAGCAGCGACTCGGAAACCAACTCCGACTCATCTTCCGAGAG | |
| | | CTACAGAAAACCCAAGCGGGTCTCCACTTAAATCCTATGTTATCAA | |
| | | ACCGGCTGTAA | |
| AAK01940.1 | AY026465.1 | ATGGCATGGGGATGGTGGAAGCGACGGCGGCGCTGGTGGTTCCG | 175 |
| | | GAAGCGGTGGACCCGTGGCAGACTTCGCAGACGATGGCCTAGAC | |
| | | CAGCTCGTCGGCGCCCTAGACGACGAAGAGTAAGGAGACGCAGA | |
| | | CGATGGAGGAGGGGGCGACCTAGACGCAGACTGTACCGACGCTA | |
| | | CAGACGCAAAAAACGTAGGAGACGAAAGCCCAAAATAATCTTAAAA | |
| | | CAATGGCAGCCAGACATTGTAAAGAGGTGCTACATAGTGGGCTAC | |
| | | ATTCCTGCCATAATATGCGGGGCGGGCACCTGGTCCCACAACTAC | |
| | | ACCAGCCACCTTCTAGACATTATCCCCAAAGGACCCTTTGGAGGG | |
| | | GGACACAGCACCATGAGATTCTCTCTAAAAGTGCTCTTCGAAGAG | |
| | | CACCTCAGACACCTAAACTTTTGGACACGTAGTAACCAGGATCTAG | |
| | | AACTTGTAAGATACTTCAGATGCTCCTTTAGGTTTTACAGAGACCA | |
| | | ACACACAGACTACTTAGTGCACTACAACAGAAAAACACCCCTGGG | |
| | | AGGCAACAGACTGACAGCACCTAGCCTTCACCCAGGGGTGCAGAT | |
| | | GCTAAGCAAAAACAAAATAATAGTACCCAGCTATGATACTAAACCT | |
| | | AAGGGCAAAAGCTATGTAAAAGTAACTATAGCACCCCCCACTCTAC | |
| | | TAACTGACAAGTGGTACTTTGCTAAAGACGTTTGTGACACAACCTT | |
| | | GGTTAACTTAGACGTTGTACTCTGCAACTTGCGGTTTCCGTTCTGC | |
| | | TCACCACAAACTGACAACCCTTGCATCACTTTCCAAGTTCTCCATT | |
| | | CTATCTATAACGACTTCCTCTCTATAGTAGATACTCAAGAATATAAA | |
| | | AATAATTTTGTTACTACCTTATCTACAAAACTAGGCACAACATGGGG | |
| | | GTCAAGACTTAACACCTTTAGAACAGAAGGGTGCTACAGTCACCCA | |
| | | AAACTACCTAAAAAACAGGTTACAGCTGCTAATGACAGTACATACT | |
| | | TTACACAACCAGACGGACTATGGGGAGATGCAGTTTTCGAGACTA | |
| | | AAGATACTACTATTATTACCAAAAACATGGAATCATATGCAACATCA | |
| | | GCCAAACAAAGGGGAGTGAACGGAGACCCCGCATTTTGCCATCTT | |
| | | ACAGGCATATACTCACCTCCCTGGCTAACACCAGGAAGAATATCC | |
| | | CCAGAAACCCCAGGACTTTACACAGACGTGACTTACAACCCATAC | |
| | | GCAGACAAAGGAGTGGGAAACCGAATATGGGTAGACTACTGCAGT | |
| | | AAAAAAGGCAATAAATATGACAATACAAGTAAATGCCTTTTAGAAG | |
| | | ACATGCCACTATGGATGGTCACCTTTGGCTACGTAGACTGGGTAA | |
| | | AAAAAGAGACTGGCAACTGGGGCATTCCACTATGGGCCAGAGTAC | |
| | | TAATAAGAAGCCCCTACACAGTGCCAAAACTTTACAACGAAGCAGA | |
| | | CCCCTCCTACGGATGGGTTCCTATCTCCTATTATTTTGGAGAAGGA | |
| | | AAAATGCCAAACGGAGACATGTACGTACCCTTCAAAGTTAGAATGA | |
| | | AGTGGTACCCGTCCATGTGGAACCAAGAACCAGTACTAAATGACTT | |
| | | AGCAAAGAGCGGACCGTTTGCATACAAAGACACAAAAACCAGTGT | |
| | | GACTGTGACTACTAAATACAAATTTACATTTAACTTCGGGGGCAAC | |
| | | CCCGTACCCTCACAGATTGTACAAGATCCCTGCACCCAGCCCACC | |
| | | TATGACATCCCCGGCACCGGTAACCTGCCTCGCAGAATACAAGTC | |
| | | ATTGACCCGAAAGTCCTCGGTCCCCACTACTCATTCCACCGGTGG | |
| | | GACTTCAGGCGTGGCCTCTTTGGCCAACAAGCTATTAAGAGAGTG | |
| | | TCAGAACAACAAACAACTTCTGAGTTTTTATTCTCAGGTCCAAAGA | |
| | | GACCCAGAATCGATCAAGGGCCTTACATCCCGCCAGAAAAAGGCT | |
| | | CAGATTCACTCCAAAGAGAATCGAGACCGTGGAGCACCTCGGAGA | |
| | | GCGAGGCAGAGACAGAAGCCCCCTCGGAAGAAGAGCCGGAGAAC | |
| | | CAAGAAGAGCAAGTACTCCAGTTGCAGCTCCGACAGCAGCTCCGA | |
| | | GAACAGCGAAAACTCAGACAGGGAATCCAGTGCCTCTTCGAGCAA | |
| | | CTGATAACAACCCAGCAGGGGGTGCACAAAAACCCATTGTTAGAG | |
| | | TAG | |
| AAK01942.1 | AY026466.1 | ATGGCCTATGGCTGGTGGGCCCGGAGACGGAGACGCTGGCGCC | 176 |
| | | GCTGGAAGCGCAGGCCCTGGAGACGCCGATGGAGGACCCGCAG | |
| | | ACGCAGACCTCGTCGCCGCTATAGACGCCGCAGACATGTAAGGA | |
| | | GACGGAGACGTGGGAGGTGGAGGAGGAGGTACAGAAAATGGCGC | |
| | | AGAAAAGGCAGGAGAAGGGGCAAAAAAAAGATTATAATAAGACAG | |
| | | TGGCAGCCCAACTACAGGAGACGCTGCAACATAATAGGCTACATG | |
| | | CCCGTGCTTATCTGTGGCAACAATACTGTGTCCAGAAACTATGCCA | |
| | | CACACTCAGATGACTCCTACCTGCCAGGACCCTTTGGAGGGGGCA | |
| | | TGACCACTGATAAATTCACCCTAAGAATACTCTATGATGAGTACTG | |
| | | TAGATTCATGAACTACTGGACAGCCTCTAACGAGGACCTGGACCT | |
| | | CTGCAGATACAGAGGCTGTACTCTGTGGTTCTTCAGACACCCAGA | |
| | | TGTAGACTTTATTATCCTTATAAACACCATGTCGCCCTTCCTCGACA | |
| | | CCCAGCTCACAGGCCCCAGCATACACCCGGGACTAATGGCCCTTA | |
| | | ACAAGAGAGCCAGATGGATCCCCAGCCTAAAAAGCAGACCGGGTA | |
| | | GAAAGCACGTAGTTAAAATTAGAGTAGGCGCTCCCAGAATGTTCAC | |
| | | AGATAAATGGTACCCCCAGTCAGATCTGTGTGACCTCCCCCTACTA | |
| | | ACTATCTTTGCCAGTGCAGCGGATATGCAATATCCGTTCGGCTCAC | |
| | | CACTAACTGACTCTGTGGTTGTGGGTTTCCAGGTTCTGCAATCCAT | |
| | | GTACAATGACTGCCTTAGCATACTTCCTGAAAATTTTAACGGCAAT | |
| | | GGCAAAGGCAAAGCTTTACATGACAACATAACTAAGTATCTCCCTA | |
| | | ACTATAACACTACTCAAACACTAGCTCAGCTAAAACCGTACATAGA | |
| | | TAACACATCCACAGGAAGCACAAATAACTGGAGCAGCTATGTAAAT | |
| | | ACATCAAAATTTACAACTGCTTCAAAAACCATTACAACCTCAGCAGA | |
| | | AGGCCCATACTATACTTTCGCAGATACCTGGTACAGAGGCACTGC | |
| | | ATACAACAATAGCATTACGAACGTTCCTTTACAGGCAGCACAACTA | |
| | | TATCACGACACAACCAAAAAACTACTAGGCACAACATTTACAGGAG | |
| | | GGTCCCCCTACCTAGAATACCACGGAGGCCTTTACTCCTCCATTTG | |
| | | GCTATCTGCAGGTCGCTCCTACTTTGAAACAAAAGGCACATACACA | |
| | | GATATAACCTACAACCCTTTTACAGACAGAGGACAAGGTAACATGG | |
| | | TATGGATAGACTGGGTATCCAAATATGACTCAGTTTACTCTAAAAC | |
| | | ACAAAGCAAATGCCTTATAGAAAACCTGCCACTGTGGGCATCAGTA | |
| | | TATGGATACGCAGAATACTGCAGCAAATCCACAGGAGACACAAAC | |
| | | ATAGAACAAAACTGCAGAGTAGTTATAAGAAGCCCCTTCACTAACC | |
| | | CTCAGCTGCTAGACCATAACAACCCACTAAGAGGGTACGTTCCCT | |
| | | ACTCCATAAACTTTGGCAACGGAAAAATGCCTGGGGGAAGCAGTC | |
| | | AGGTCCCCATAAGAATGAGAAGCAAGTGGTACCCTACTCTATTTCA | |
| | | CCAAAAAGAAGTGTTAGAGGCCATAGCGCAGGCGGGCCCCTTCG | |
| | | CGTACCACAGTGATCAGATGAAAGTGTCACTAGGCATGAAATACG | |
| | | CCTTTAAGTGGGTGTGGGGTGGCAACCCCGTATCCCAACAGGTTG | |
| | | TTAGAAACCCCTGCAAGGACACCGGTGTTTCCTCGGGCAATAGAG | |
| | | TCCCTCGATCAGTACAAATCGTTGACCCGAAGTACAACACTCCAGA | |
| | | ACTTGCAATACATGCCTGGGACTTCAGACGTGCCTGTTTGGCCCA | |
| | | AAAGCTATTAAGAGAATGCAAACAGAACCGTACCCTACTGAACTTC | |
| | | TTTCGCCAGGGCGAAAAAGATACAGGAGAGACACAGAAGCTCTAC | |
| | | TCCCCAGCCAAGAAGAACAACAAAAAGAAAACTTATTTTTCCTCCC | |
| | | AATCAAGCAGCTCCGACCAATCCCCCGTTGGAGGAGTCGGACCAA | |
| | | AGCCAAAGCGAGGAAGAGGGGGTCCAACAAGAGACGCAGACACT | |
| | | CTCCCAGCAGCTCCAGCAGCAGCTCAAGGAGCAGCAGCTCATGG | |
| | | GGGTCCAACTCCGAGCCCTGTACCAACAATTACAACGGGTCCAAC | |
| | | AAAACACACATATCGACCCTACCTTTTTGCAAGGGGGGCGGGCGT | |
| | | AACATCTTTATTTCAAACAGCGTAG | |
| AAK11696.1 | AF345521.1 | ATGGCGTGGTGGGGCAGATGGAGAAGGTGGCCGCGGCGCCGGT | 177 |
| | | GGAGGAGATGGCGGCGCCGCCGTAGAAGGAGACTACCAACAAGA | |
| | | AGAACTCGACGAGCTGTTCGCGGCCTTGGAAGACGACCAAGAAAG | |
| | | ACGGTAAGGAGACGCCGGCGCCGACCCAGACGCACTTACCGACG | |
| | | GGGGTGGCGACGCAGACGGTACATAAGACGCAGGAGGGGACGC | |
| | | AGAAAGAAACTGACTCTGACTATGTGGAACCCCAACATAGTGAGG | |
| | | AGATGTAACATAGAGGGAGGGCTGCCTCTAATACTGTGTGGAGAA | |
| | | AACAGGGCCGCATTTAACTACGCCTACCACTCAGAGGACTACACA | |
| | | GAGCAGCCATTCCCCTTCGGTGGAGGAATGAGCACCACCACATTC | |
| | | TCACTGAGAGGCCTCTATGACCAGTACACAAAACACATGAACAGAT | |
| | | GGACGTTCTCAAACGACCAGCTAGACCTCGCCAGATACAGGGGCT | |
| | | GCAAATTCAGGTTTTACAGACACCCCACCTGTGACTTTATAGTGCA | |
| | | CTACAACCTGGTTCCTCCTCTAAAGATGAACCAGTTCACCAGTCCC | |
| | | AACACGCACCCGGGACTCCTCATGCTGACTAAACACAAAATAATAA | |
| | | TACCCAGCTTCTTAACAAGACCAGGGGGTCGCAGATTCGTAAAGA | |
| | | TCAGACTGCCCCCCCCTAAGCTGTTTGAAGACAAGTGGTACACCC | |
| | | AGCAGGACTTGTGCAAACAACCGTTAGTTACTCTAACCGCAACCG | |
| | | CAGCTTCCTTGCGGTATCCGTTCTGCTCACCACAAACGAACAACC | |
| | | CCAACTGTACCTTCCAGGTACTGCGCAAAAATTACCACAAAGTAAT | |
| | | AGGTACTTCCTCAACAAACAGTGAGGACGTGACCCCCTTTGAAAA | |
| | | CTGGCTATATAATACAGCCTCACACTATCAAACTTTTGCCACCGAG | |
| | | GCACAAGTTGGTAGAATACCAAGCTTTAACCCAGACGGTACAAAAA | |
| | | ATACAAAAGAATCTGAATGGCAAAATTACTGGTCCAAAAAAGGTGA | |
| | | ACCATGGAACCCTAATAGTAGTTACCCACATACAACTACAAATCAA | |
| | | ATGTACAAAATACCTTTTGACAGCAACTATGGCTTTCCAACTTACAA | |
| | | ACCAATAAAAGAATACATGTTACAAAGAAGAGCATGGAGTTTCAAA | |
| | | TATGAAACAGACAACCCAGTTAGCAAAAAGATCTGGCCACAACCTA | |
| | | CCACAACAAAACCAACAATAGACTACTATGAATACCACGCAGGCTG | |
| | | GTTCAGTAACATCTTCATAGGCCCCAACAGACACAGCTTACAATTC | |
| | | CAAACAGCATACGTAGACACCACATACAACCCACTGAATGACAAA | |
| | | GGAAAGGGCAACAAGATATGGTTTCAGTATCACAGCAAAGTAAAC | |
| | | ACAGACCTCAGAGACAGAGGCATCTACTGCCTCCTAGAAGACATG | |
| | | CCCCTGTGGTCTATGACCTTTGGATACAGTGACTATGTCAGCACAC | |
| | | AGCTAGGCCCAAACGTGGACCACGAGACTCAAGGCCTTGTGTGCA | |
| | | TAATATGCCCGTACACTGAGCCCCCAATGTATGACAAGACCAATCC | |
| | | AAACAGTGGCTATGTAGCATATGACACAAACTTTGGAAATGGCAAG | |
| | | ATGCCGTCAGGCAGAAGCCAGGTACCCGTGTACTGGCAGTGCAG | |
| | | ATGGAGGCCCATGTTGTGGTTCCAGCAGCAAGTACTGAATGACAT | |
| | | CTCAAAAAGTGGACCGTACGCATACAGAGACGAACTGAAAAACTG | |
| | | TTGCCTGACTGCTTACTACAACTTCATTTTTGACTGGGGGGGCGAC | |
| | | ATGTATTACCCGCAGGTCATTAAAAACCCCTGCGCAGACAGCGGA | |
| | | CTCGTACCCGGTACCAGTAGATTCACTCGAGAAGTACAAGTCGTTA | |
| | | GCCCGCTGTCCATGGGCCCCCAGTACATCCTCCATCTCTTCGACC | |
| | | AAAGACGCGGGTTCTTTAGTTCAAACGCTCTTAAAAGAATGCAACA | |
| | | ACAACAAGAATTTGATGAGTCTTTTACAGTCAAACCTAAGCGACCC | |
| | | AAACTTTCTACAGCCGCCCACGTCGAGCAGCAAGAAGAAGACTCG | |
| | | AGTTCAAGGGAAAGAAAATCGGGGTCCTCACAAGAAGAAGTCCAG | |
| | | GAAGAAGTCCTCCAGACGCCGGAGATCCAGCTTCACCTCCAGCGA | |
| | | AACATCAGAGAACAGCTGCACATCAAGCAGCAGCTCCAACTCCTG | |
| | | TTACTCCAATTATTCAAAACACAAGCAAATATCCACCTGAACCCAC | |
| | | GTTTTATAAGCCCATAA | |
| AAK11698.1 | AF345522.1 | ATGGCGTGGCGCCGGTGGCGATGGCGGCCGTGGTGGAGACGCC | 178 |
| | | GGAGGCGCCGCCGGTGGAGAAGGAGACGGAGGAGACCCAGACG | |
| | | ACGCCGCCCTTATCGACGCCGTCGACCTCGCAGAGTAAGGAGGC | |
| | | GCAGGGGGCGGTGGAGGCGCGCGTACAGACGTTGGGGGCGACG | |
| | | CAGACGCAGACGCAGGCACAAAAAGAAACTTGTACTGACTCAGTG | |
| | | GCAACCAGCAGTAGTTAAGAGGTGCCTAATAGTGGGCTTTGACCC | |
| | | CCTTATAATATGTGGCATTAACAGAACAATATTTAACTACACTACAC | |
| | | ACTCTGAAGACTTTACTTTTAACAACGACAGCTTTGGAGGGGGGCT | |
| | | CTGTACCGCTCAGTACACACTAAGAATCCTTTTCCAAGAAAAGCTG | |
| | | GCCCAGCACAACTTCTGGTCAGCTAGCAACGAAGACCTAGACCTT | |
| | | GCCAGGTACCTAGGAGCCACAATAGTACTTTACAGACACCCTACA | |
| | | GTAGACTTCTTAGTTAGAATTCGCACCAGTCCTCCCTTTGAGGACA | |
| | | CAGACATGACAGCCATGACACTACATCCAGGCATGATGATGCTAG | |
| | | CTAAAAAGACAATTAAAATTCCCAGTCTTAAAACAAGACCGTCCAG | |
| | | AAAACACGTAGTAAGGATTAGAGTAGGGGCCCCTAAACTATTTGAA | |
| | | GACAAGTGGTACCCCCAGAACGAGCTATGTGATGTAACTCTGCTA | |
| | | ACCATACAGGCAACCACAGCTGATTTCCAATATCCGTTCGGCTCAC | |
| | | CACTAACGAACTCCCCCTGTTGCAACTTCCAGGTTCTTAACAGTAA | |
| | | CTATGACAATGCACATTCCATACTTAACTTGTCAAACGAACCAACA | |
| | | AACAAATGGCACACCTATAGAAATAACTGCTATAAATTTCTACTAGA | |
| | | ACAGTACAGCTACTACAACACTAAACAAGTAGTAGCACAACTTAAA | |
| | | TATAAATGGAACCCTAATCAAAACCCTACTATGCCAAATACAAGCA | |
| | | ATGCATCACTTTCTAAAAAACCTGATGACCTTACTAAAACCAAAACA | |
| | | ACAAACGAGTATCCACATTGGGACACCCTATATGGTGGTTTAGCAT | |
| | | ATGGACACAGCACTGTAACACCTGGCACTACCTCATCACCAACAG | |
| | | ACCTAAAAACACAAATGCTTACAGGCAACGAATTTTATACAACAGC | |
| | | AGGCAAAAAGTTAATAGATACATTTCACCCAATTCCTTACTATGAAA | |
| | | ACGGATCTTCTAAAGCCAACACCAACATATTTGACTACTACACAGG | |
| | | CATGTACAGTAGTATTTTCCTGTCTTCAGGCAGATCAAACCCAGAA | |
| | | GTAAAGGGCAGCTACACAGACATCTCTTACAACCCTCTGACAGAC | |
| | | AAGGGAGTAGGTAACATGATTTGGATAGACTGGCTCACTAAAGGA | |
| | | GACACAGTATACGACCCCAAAAAAAGCAAGTGCCTACTCTCAGACT | |
| | | TTCCATTGTGGTCACTTTGTTATGGATACCCAGACTACTGCAGAAA | |
| | | ACAAACCGGAGACTCAGGTATTTACTATGACTACAGAGTACTTATA | |
| | | AGATGTCCATACACATACCCTCAATTAATAAAACACAACGACAAAT | |
| | | ACTTTGGCTTCGTAGTGTACAGCGAAAACTTTGGACTGGGGCGAC | |
| | | TACCAGGAGGCAACCCTAACCCCCCAACTAGAATGAGACTGCACT | |
| | | GGTACCCTAATATGTTCCACCAAACAGAAGTACTAGAGTGCATAGC | |
| | | TCAAAGCGGACCGTTTGCTTATCATGGAGACGAGAGAAAAGCTGT | |
| | | TCTGACTGCCAAATACAAGTTCAGATGGAAGTGGGGAGGCAATCC | |
| | | TGTGTTTCAACAGGTTCTCCGAGACCCCTGCACCGGAGGTGCCGT | |
| | | GGCGCCCCACACCAGTCGACACCCTCGTGCAATACAAGTCCATGA | |
| | | CCCGAAGTATCAGGCCCCGGAGTACCTCTTCCACAAATGGGACTT | |
| | | CAGAAGGGGACTGTTTAGCACTAAAGGTATTAAGAGAGTGTCAGA | |
| | | ACAACCAGTACATGATGAGTATTTTACAGGGAGCAGCAAGAGACC | |
| | | CAAGAAAGACACCAACCCAAGCCCCCAAGGAGAAGAGCAAAAAGA | |
| | | AGGCTCGCGTTTCAGAGTCCCAGAGCTCAGACCCTGGCTCCCCTC | |
| | | CAGCCAGGAAACGCAGAGCCAAAGCGAGCAAGAAGAAACAGCCC | |
| | | CGAAAACGGTCCAAGAGCAGCTACAAGAACAACTCCAGCAGCAGC | |
| | | AGCTCATGGGAATCCAGCTCAGAAACGTCTGTCTCCAGCTCGCAA | |
| | | GAGTCCAAGCGGGGCACAGTCTCCACCCCGTTTTCCAATGCCATG | |
| | | CATAA | |
| AAK11704.1 | AF345525.1 | ATGGCATGGGGATGGTGGAGACGAAGGCGCAAGTGGTGGTGGAG | 179 |
| | | ACGCCGGTTCGCCCGAAGCAGACTTCGCAGACGACGGATTAGAC | |
| | | GCCCTCGTCGCCGCACTCGACGAAGAACAGTAAGGAGGCGCAGA | |
| | | CAATGGAGGAGGGGGCGACCCAGACGCAGACTGTTTAAGAGAAA | |
| | | GAGACGCTTTAAGAGACGCAGACGAAAAGCTAAGATAAAAATAACT | |
| | | CAGTGGCAGCCTAGCTCAGTGAAGAGATGTTTTGTTATAGGATACT | |
| | | TTCCATTAGTAATATGTGGACCCGGAAGGTGGTCAGAAAACTTTAC | |
| | | TAGTCACATAGAAGACAAAATAAGCAAAGGACCCTTTGGGGGAGG | |
| | | GCATAGTACTAGCAGATGGTCCTTAAAAGTACTGTACGAAGAGTTC | |
| | | CAAAGACACCACAACTTTTGGACAAGAAGCAACAAAGACCTAGAG | |
| | | TTAGTTAGATTCTTTGGAAGTAGTTGGAGATTTTACAGACACGAGG | |
| | | ACACTGACTATATAGTGTACTACTCTAGAAAGGCTCCCCTTGGAGG | |
| | | TAACCTTCTAACAGCACCCAGCCTACACCCAGGAGCAGCCATGCT | |
| | | TAGCAAACACAAAATAGTAGTACCCAGTTTTAAAACCAGACCCGGT | |
| | | GGAAAACCCACCGTTAAAATTAATATTAAACCCCCTACAACACTAAT | |
| | | AGACAAATGGTACTTCCAGAAAGACATTTGTGACACAACCTTCCTT | |
| | | AACTTGAACGTTGTACTCTGCAACCTGCGGTTTCCGTTCTGCTCAC | |
| | | CACAAACTGACAACATTTGTGTAACCTTCCAGATATTGCATGAGGT | |
| | | TTACCACAATTACATAAGCATAACTGCAAAAGAGTTACTTACAGGC | |
| | | ACAGAATGGAGACAGTACTACAAAAACTTTTTAAACGCAGCACTAC | |
| | | CAAATGACAGATCTGTAAATAAATTAAACACTTTTAGCACAGAAGG | |
| | | AGCCTACAGCCACCCACAAATAAAAAAACATACAGAAAATATAACA | |
| | | GGTTCAGGAGACAAATACTTTAGAAAAAAAGATGGACTGTGGGGA | |
| | | GATGCTATTCACATTACAGACCAACAAAACAGAACAGAAGTTATAG | |
| | | ACTTAATATTAAAAAATGCAGAAAACTACCTCAAAAAAGTACAACAG | |
| | | GAATACCAAGGACAGGAAAATTTAAAAAACCTTATACATCCCGTCT | |
| | | TTTGTCAGTACGTAGGCATATTTGGGCAGCCCACTACTAAACTACC | |
| | | ACAGAATAAGCCCAGAAATTCCAGGCCTGTACAAAGACATAATATA | |
| | | TAA | |
| AAK11708.1 | AF345527.1 | ATGTCCTGGTGGGGATGGCGCCGCCGATGGTGGTGGAAGCCACG | 180 |
| | | GAGGCGATGGAGACGCAGGAGGGCGCGCCGCCCGAGACGACTA | |
| | | CCGCGACGACGATATAGAAGACCTACTCGCCGCTATCGAGGCAGA | |
| | | CGAGTAAGGAGGCGCCGCGCGGGGGGCTGGCGGGGGCGACGCA | |
| | | GATACTCCCGACGCTATAGCAGACGACTGACTGTCAGACGAAAGA | |
| | | AAAAGAAACTAACTCTTAAGATCTGGCAGCCACAGAATATCAGGAG | |
| | | ATGTAAGATAAGGGGTCTACTGCCCCTCCTGATATGCGGACACAC | |
| | | CCGATCTGCCTTTAACTATGCCATCCACTCGGATGACAAGACCCC | |
| | | CCAACAGCAGAGTTTCGGGGGTGGGCTCAGCACCGTTAGCTTCTC | |
| | | CCTGAAAGTCCTATTCGACCCGAACCAGAGGGGACTTAACAGGTG | |
| | | GTCGGCCAGCAACGACCAGCTTGACCTCGCCCGGTACACGGGCT | |
| | | GCACGTTCTGGTTCTACAGACACAAAAAGACTGACTTTATAGTGCA | |
| | | GTATGATGTCAGCGCCCCCTTCAAACTAGACAAAAACAGTTGTCCC | |
| | | AGCTACCACCCCTTCATGCTCATGAAGGCCAAACACAAGGTCCTC | |
| | | ATCCCCAGTTTTGACACTAAACCCAAAGGCAGAGAAAAGATAAAAC | |
| | | TAAGGATACAGCCCCCCAAGATGTTCATAGATAAGTGGTACACTCA | |
| | | GGAGGACCTATGCCCCGTTATTCTTGTGACACTTGTGGCGACCGC | |
| | | AGCTTCCTTTACACATCCGTTCTGCTCACCACAAACTGCCAACCCT | |
| | | TGCATCACCTTCCAGGTTTTGAAAGAATTCTATTACCAAGCCATGG | |
| | | GGTACGGCACACCAGAAACCACAATGAGCACAATATGGAACACCC | |
| | | TCTACACAACTAGCACCTACTGGCAGTCACACTTAACCCCACAGTT | |
| | | TGTCAGAATGCCCAAAAACAATCCTGATAACACTGCGAACACTGAG | |
| | | GCCAATAAGTTTAATGAGTGGGTTGACAAAACGTTTAAAACAGGCA | |
| | | AGTTAGTTAAATACAACTATAACCAGTATAAACCTGACATAGAGAAA | |
| | | CTAACCCTACTAAGACAATACTACTTTCGATGGGAGACACAGCATA | |
| | | CAGGGGTCGCAGTCCCACCTACGTGGACTACCCCCACAACAGACA | |
| | | GATACGAGTACCACGTAGGCATGTTCAGTCCCATCTTCCTCACCC | |
| | | CTTATAGATCAGCGGGCCTAGACTTTCCGTACGCCTACGCAGACG | |
| | | TCACATACAATCCCCTCACAGACAAAGGGGTGGGCAACCGCATGT | |
| | | GGTACCAGTACAACACTAAGATAGACACCCAGTTCGACGCCAAAT | |
| | | GCTGTAAGTGCGTCCTAGAGGACATGCCCCTCTATGCCATGGCCT | |
| | | TCGGCCACGCAGACTTTCTAGAACAGGAGATAGGAGAGTACCAGG | |
| | | ACCTAGAGGCCAACGGATACGTGTGTGTTATCAGTCCCTACACCA | |
| | | AGCCCCCCATGTTCAACAAACACAACCCTCAGCAGGGATACGTGT | |
| | | TCTATGACTCACAGTGGGGCAATGGCAAATGGATAGACGGCACCG | |
| | | GGTTCGTCCCAGTGTACTGGCTGACCAGATGGAGAGTAGAACTGC | |
| | | TATTTCAAAAGCAAGTACTCTCAGACCTCGCCATGTCAGGGCCCTT | |
| | | CAGCTATCCAGACGAACTTAAGAACACAGTACTGACGGCCAAGTA | |
| | | CAGATTTGACTTTAAGTGGGGTGGCAATCTCTTCCACCAACAGACC | |
| | | ATTAGAAACCCCTGCAAACCCGAAGAGACCTCGACCGGTAGAATC | |
| | | CCTCGCGATGTACAAGTCGTTGACCCGGTCACCATGGGCCCCCGA | |
| | | TTCGTCTTTCACTCCTGGGACTGGAGGAGAGGGTTCCTTAGTGAC | |
| | | AGAGCTCTCAAAAGAATGTTTGAGAAACCGCTCGATTTTGAGGGAT | |
| | | TTACAGCGACTCCAAAACGACCTCGCATACTCCCTCCCACAGAGG | |
| | | GACAGCTCGCCCGAGAGCAAAAAGAGCAAGAAGAAAGCTCAGATT | |
| | | CGCAGGAAGAAAGCAGCCTTACCCCGCTCGAAGAAGTCCCGCAA | |
| | | GAGACGAAGCTACGACTCCACCTCAGAAAGCAGCTCCGAGAGCA | |
| | | GCGAAGCATCAGACACCAACTCAGAACCATGTTCCAGCAGCTTGT | |
| | | CAAGACGCAAGCGGGCCTACACCTAAACCCCCTTTTATCTTCCCA | |
| | | GCTGTAA | |
| AAK11710.1 | AF345528.1 | ATGTGGAATCCATCCACAATTAGAGCATGTAACATAAAGGGTGCTA | 181 |
| | | TAAACCTTGTAATGTGCGGACACACTCAGGCAGGCAGAAACTATG | |
| | | CCATTAGAAGTGAAGACTTTTATCCTCAAATACAAAGCTTTGGTGG | |
| | | GTCATTTAGTACAACTACATGGAGCCTTAGAGTACTGTTTGATGAA | |
| | | TACCAAAAGTTCCACAACTTTTGGACATATCCTAATACTCAGCTAGA | |
| | | TCTATGTAGATATAAATATGCTATATTTACCTTTTACAGAGACCCTA | |
| | | AAGTAGACTACATTGTTATATACAACACAAATCCACCATTTAAAATT | |
| | | AACAAATACAGTAGTCCCTTTTTACACCCCGGACTTATGATGTTAC | |
| | | AAAAAAAAAAAATACTAATACCTAGCTTTCAAACAAAACCAGGGGG | |
| | | CAAATCTAGAATTAAGGTTAAAATTAAGCCCCCTGCTCTATTTGAAG | |
| | | ACAAGTGGTACACTCAACAAGACTTGTGTCCAGTAAACCTGTTGTC | |
| | | ACTTGCGGTTTCCGCCTGCAGCTTTATACATCCGTTCTGCTCACCA | |
| | | GAAAGTGACACAATATGCATGACATTTCAGGTATTGCGAGAGTTTT | |
| | | ACTACACACACCTAACTGTCACTCCAACCACAACTACCTCCACACC | |
| | | AGAAAAAGACAAAAAAATATTTAATGACCAATTATACTCCAACGCTA | |
| | | ACTTTTATCAATCGCTACACGCATCAGCGTTCTTAAACATTGCTCA | |
| | | GGCACCTGCTATACATGGCCACAATGGAATACCAAACAACAGTAG | |
| | | GTATTTAAGTTCCACAGGTACAGAAACAAGTTTTAGAACTGGAAAC | |
| | | AATAGTATATATGGACAACCAAATTATAAACCAATTCCAGAGAAATT | |
| | | AACAGAAATAAGAAAGTGGTTTTTCAAACAAGCTACAACACCTAAT | |
| | | GAAATTCATGGCACATATGGAAAACCAACATATGATGCAGTAGACT | |
| | | ACCACTTAGGCAAATACAGTCCAATATTCTTAAGTCCATACAGAAC | |
| | | TAACACACAATTTCCCACTGCATACATGGATGTAACTTATAATCCAA | |
| | | ATGTAGATAAAGGAAAAGGCAACAAAATATGGCTTCAATCAGTAAC | |
| | | AAAAGAAACATCTGATTTTGACTCACGTAGCTGCAGATGTATAATA | |
| | | GAAAACTTACCCATGTGGGCCATGGTTAACGGGTACTCAGACTTT | |
| | | GCAGAGTCTGAATTAGGATCTGAAGTACACGCTGTATATGTTTGCT | |
| | | GTATTATTTGTCCTTACACAAAACCTATGCTATATAACAAAACAAAC | |
| | | CCAGCAATGGGCTATATATTTTATGATACTTTATTTGGCGACGGAA | |
| | | AACTACCATCAGGTCCAGGTCTTGTTCCATTTTATTGGCAAAGCAG | |
| | | ATGGTATCCAAAACTAGCTTGGCAACAACAAGTACTACATGATTTTT | |
| | | ATTTGTGTGGCCCCTTTAGCTACAAAGATGACCTCAAAAGCTTTAC | |
| | | TATAAACACAACTTACAAGTTTAAATTCTTATGGGGTGGAAATATGA | |
| | | TTCCCGAACAGGTTATCAAAAACCCGTGCAAAACAACAGATCCAAC | |
| | | ATACACCCTGTCCGATAGACAGCGTCGCGACCTACAAGTTGTTGA | |
| | | CCCAATTACCATGGGCCCGCAGTGGGAATTCCACACCTGGGACTG | |
| | | GCGACGCGGACTGTTTGGACAAAATGCTCTTAGAAGAGTGTCAGA | |
| | | AAAACCAGGAGATGATGCAGAGTATTATGCGCCTCCAAAAAAACCT | |
| | | AGATTTTTCCCACCAACAGACCTCGAAGAGCAAGAAAAAGACTCAG | |
| | | ATTCACAGGAGGAGACGAGACTCCTATTCCACCCGTCGCCGCCAA | |
| | | GGAGCCAAGAAGAGATCCAGCAAGAGCAGCAGCGAGACATCCAC | |
| | | CTCAGACTCGGACAACAACTCAGAATCAGACAGCAGCTCCAGCAA | |
| | | GTGTTCTTACAAGTCCTCAAAACGCAAGCGAACCTCCACATAAATC | |
| | | CATTATTCTTAAACCAACAATAA | |
| AAK11712.1 | AF345529.1 | ATGGCATGGGGATGGTGGAGACGGTGGCGCCGGTGGCCCACCA | 182 |
| | | GACGCTGGAGGAGACGCCGTCGCCGGCGCCCCGTACGGAGAAC | |
| | | AAGAGCTCGCCGACCTGCTCGACGCTATAGAAGACGACGAACAGT | |
| | | AAGAACCAGGCGGAGGCGGTGGGGGCGCAGACGGTACAGACGG | |
| | | GGCTGGAGACGAAGGACTTATGTAAGGAAGGGGCGACACAGAAA | |
| | | AAAGAAAAAGAGACTCGTACTGAGACAGTGGCAGCCAGCCACCAG | |
| | | ACGCAGATGCACTATAACTGGGTACCTGCCCATAGTGTTCTGCGG | |
| | | ACACACTAAGGGCAATAAAAACTATGCACTACACTCTGACGACTAC | |
| | | ACCCCCCAAGGACAGCCATTTGGAGGGGCCCTTAGCACTACCTCT | |
| | | TTCTCCCTAAAAGTGTTGTATGACCAGCACCAGAGGGGACTAAACA | |
| | | AGTGGTCTTTTCCCAACGACCAGCTAGACCTTGCCAGATACAGAG | |
| | | GCTGCAAATTCTACTTCTATAGAACCAAACAGACTGACTGGGTGGG | |
| | | CCAGTATGACATATCAGAACCCTACAAGCTAGACAAGTACAGCTGC | |
| | | CCTAACTACCACCCGGGAAACATGATTAAGGCAAAGCACAAATTTT | |
| | | TAATTCCAAGCTATGATACTAATCCCAGAGGGAGACAAAAAATTAT | |
| | | AGTTAAAATTCCCCCCCCAGACCTTTTTGTAGACAAGTGGTACACT | |
| | | CAGGAAGACCTGTGTGACGTTAATCTTGTGTCATTTGCGGTTTCTG | |
| | | CGGCTTCCTTTCTCCACCCATTCGGCTCACCACAAACTGACAACCC | |
| | | TTGCTACACCTTCCAGGTGTTGAAAGAATTCTACTATCAGGCAATA | |
| | | GGCTTTAGTGCAACAGAGGAAAAAATACAAAATGTTTTTAACATATT | |
| | | ATACGAAAACAACTCATACTGGGAATCAAACATAACTCCCTTTTATG | |
| | | TAATTAATGTTAAAAAAGGGTCTAACACAGCACAGTACATGTCACC | |
| | | TCAAATTTCAGACGCAGATTTTAGAAATAAAGTAAATACTAACTACA | |
| | | ACTGGTATACCTACAATGCCAAAACCCATAAAGAAAAATTAAAAAC | |
| | | GCTAAGACAAGCATACTTTAAACAATTAACCTCTGAAGGTCCGCAA | |
| | | CACACATCCTCTCACGCAGGCTACGCCACTCAGTGGACCACCCCC | |
| | | AGCACAGACGCCTACGAATACCACCTAGGCATGTTTAGTACCATCT | |
| | | TTCTAGCCCCAGACAGACCAGTACCTCGCTTTCCCTGCGCCTACC | |
| | | AAGATGTCACCTACAATGCCTTAATGGACAAAGGGGTGGGCAACC | |
| | | ACGTGTGGTTTCAGTACAACACAAAGGCAGACACTCAACTAATACT | |
| | | CACCGGAGGGTCCTGCAAAGCACACATAGAAAACATACCCCTGTG | |
| | | GGCAGCCTTCTATGGCTACAGCGACTTCATAGAGTCAGAGCTAGG | |
| | | CCCCTTTGTAGACGCAGAGACAGTAGGCCTTATATGTGTAATCTGC | |
| | | CCCTACACTAAACCCCCCATGTACAACAAGACAAATCCCATGATGG | |
| | | GGTACGTGTTTTATGACAGAAATTTTGGTGACGGCAAATGGACTGA | |
| | | CGGACGGGGCAAAATAGAGCCCTACTGGCAGGTTAGGTGGAGGC | |
| | | CAGAAATGCTTTTTCAAGAGACTGTAATGGCAGACATAGTTCAAAC | |
| | | CGGGCCCTTTAGCTACAAGGACGAACTTAAAAACAGCACACTAGT | |
| | | GTGCAAATACAAATTCTATTTCACCTGGGGAGGTAACGTGATGTTC | |
| | | CAACAGACGATCAAAAACCCATGCAAGACGGACGAACAACCCACC | |
| | | GACTCCGGTAGACACCCTAGAGGAATACAAGTGGCGGACCCGGA | |
| | | ACAAATGGGACCCCGTTGGGTGTTCCACTCCTTTGACTGGCGAAG | |
| | | GGGCTATCTTAGCGAGAAAGCTCTCAAACGCCTGCAAGAAAAACC | |
| | | TCTTGACTATGACGAATATTTTACACAACCAAAAAGACCTAGAATGT | |
| | | TTCCTCCAACAGAATCAGCAGAAGGAGAGTTCCGAGAGCCCGAAA | |
| | | AAGGCTCGTATTCAGAGGAAGAAAGGTCGCAAGCCTCTGCCGAAG | |
| | | AGCAGACGAAAGAGGCGACAGTACTTCTCCTTAAACGACGACTCA | |
| | | GAGAGCAACAGCAGCTCCAGCAGCAGCTCCAATTTCTCACCCGAG | |
| | | AAATGTTCAAAACGCAAGCGGGTCTCCACCTAAACCCTATGTTATT | |
| | | AAACCAGCGGTGA | |
| AAK54731.1 | AF371370.1 | ATGCGCTTTTCCAGAATCTACAGGCCAAAGAAAGGGCCACTGCCA | 183 |
| | | CTGCCTCTGGTGCGAGCAGAACAGAAAAAACAGCCTAGTGATATG | |
| | | AGTTGGCGCCCTCCGCTTCACAATGGGGCAGGAATCGAGCGTCA | |
| | | GTTTTTCGAAGGCTGCTTTCGATTCCACGCTAGTTGTTGCGGCTGT | |
| | | GGCAATTTTGTTACTCATATTACTCTACTGGCTGCTCGCTATGGTTT | |
| | | TACTGGGGGGCCGACGCCGCCAGGTGGTCCTGGGGCGCTACCCT | |
| | | CGCTAAGGAGAGCGCTGCCACCTCCTCCGGCCCCCCAAGACCAG | |
| | | GCTGAACCAGAGCTATGGCGTGGTCGTGGTGGTGGAGGCGAAGG | |
| | | AAACGCTGGTGGCCGCGCAGAAGGAGGCGATGGAGAAGGCTACG | |
| | | AACCCGAAGAACTGGAAGAGCTGTTCCGCGCCGCCGCCGCCGAC | |
| | | GACGAGTAA | |
| BAB69916.1 | AB060596.1 | ATGGCGTTCCGGTGGTGGTGGTGGAGACGCCGCCCGCAGCGACG | 184 |
| | | ATGGACCCGGCGCCGATGGAGGAGACTACGAACCCGCCGACCTA | |
| | | GACGCACTGTACGACGCCGTCGCCGCAGACCAAGAGTAAGGAGA | |
| | | AGGCGGTGGGGCAGGAGACGTGGGCGACGCAGACTGTACAGAC | |
| | | GCACATATAGAAAAAGGCGCAAAAGACGAAAAAAAATGACCTTAAA | |
| | | AATGTGGAATCCATCCACAATTCGCGCCTGTAACATTAGGGGCTTC | |
| | | ATAGCACTAGTAGTCTGTGGACACACTCGTGCAGGCTGTAACTAT | |
| | | GCCATACACAGCGAAGACTACATACCTCAACTAAGACCCTACGGA | |
| | | GGGTCTTTCAGCACTACTACTTGGAGTCTAAAACTACTATTTGACG | |
| | | AATATCTGAAATTTAGAAACAAATGGAGCTACCCCAACACAGAACT | |
| | | AAACCTTGCTAGATACAGGGGAGCCACATTTACATTTTACAGAGAC | |
| | | CCCAAAGTAGACTATATAGTAGTATACAACACAGTACCTCCATTTAA | |
| | | ACTTAACAAATACAGCTGCCCCATGCTGCACCCAGGTATGATGATG | |
| | | CAGTACAAAAAGAAAGTTTTAATACCAAGCTATCAGACAAAACCAA | |
| | | AGGGAAAAGCCAAAATAAGACTTAGAATAAAACCTCCAGTTTTATTT | |
| | | GAAGACAAATGGTACACCCAGCAAGACCTGTGTCCCGTTAATCTTT | |
| | | TGTCACTTGCGGTTAGCGCATGTTCCTTCCTGCATCCGTTTATACC | |
| | | ACCAGAAAGTGACAACATATGCATAACGTTCCAGGTGTTGCGAGA | |
| | | CTTTTATTACACACAAATGTCAGTTACACCCACAACAACCACTTCCC | |
| | | TAAATCAGAAAGATGAAAAAATATTTAGTGACCACTTATATAAAAAC | |
| | | CCTGAATACTGGCAATCACATCACACAGCTGCTAGACTATCTACCT | |
| | | CTCAAAAACCTGCACTACGAAATAAAGAAGAAATACCTAATGATCA | |
| | | CGGATACTTAAACACAACACCAACTGACAGTACTTTTAGAACTGGA | |
| | | AACAATACAATATATGGCCAACCAAGCTACAGACCAAACTATACCA | |
| | | AACTAACTAAGATTAGAGAATGGTACTTTACACAAGAAAACACAGA | |
| | | CAACCCAATACATGGCAGCTACTTAAAACCAACACTAAACTCTGTA | |
| | | GACTACCACCTAGGAAAATACAGTGCTATATTCTTAAGTCCCTATA | |
| | | GAACAAACACTCAATTTGATACAGCATACCAAGATGTAACCTACAA | |
| | | TCCTAACACAGACAAAGGCAAAGGCAATAAAATATGGATTCAGAGC | |
| | | TGTACAAAAGAATCCACCATACTAGACAACGCATGCAGATGTGTAA | |
| | | TAGAAGACATGCCATTATGGGCTATGGTAAATGGCTACTTAGAATT | |
| | | CTGTGACTCAGAGCTTCCAGGAGCCAACATCTACAATACATACATA | |
| | | GTAGTTGTTATATGCCCTTACACCAAACCTCAACTACTAAACAAAAC | |
| | | TAATCCAAAACAAGGCTATGTATTTTATGACACTCTATTTGGAGACG | |
| | | GAAAAATGCCCACAGGAACAGGCCTAGTACCGTTCTGGCTGCAGA | |
| | | GCAGATGGTACCCCAGAGCAGAGTTCCAACAACAAGTACTACATG | |
| | | ACCTTTACCTTACAGGCCCATTTAGCTACAAAGATGACCTAAAATC | |
| | | CTTTAGCTTTAATGCTAAATACAAATTCTCATTCTTATGGGGCGGCA | |
| | | ATATGATTCCCCAACAGATTATCAAAAACCCGTGTAAAAAAGAAGA | |
| | | ATCCACATTCACCTATCCCAGTAGAGAGCCTCGCGACCTACAAGTT | |
| | | GTTGACCCACTCACCATGGGCCCAGAATGGGTCTTCCACACATGG | |
| | | GACTGGAGACGTGGACTTTTTGGTAAAAATGCTGTCGACAGAGTG | |
| | | TCAAAAAAACCAGACGATGATGCAGAATATTATCCAGTACCAAAAA | |
| | | GGCCTCGATTCTTCCCTCCAACAGACACACAGTCAGAGCCAGAAA | |
| | | AAGACTTCGGTTTCACACCGGAGAGCCAAGAGTTACAGCAAGAAG | |
| | | ACTTACGAGCACCCCAAGAAGAAAGCCAAGAGGTACAGCAGCAGC | |
| | | GACTGCTCCAGCTCAGACTCTCACAGCAGTTCAGACTCAGACAGC | |
| | | AGCTCCAGCACCTGTTCGTACAAGTCCTCAAAACCCAAGCAGGTC | |
| | | TCCACATAAACCCATTATTTTTAAACCATGCATAA | |
| BAB69900.1 | AB060592.1 | ATGGCGTGGACCTGGTGGTGGCAGAGGAGGCGCCGAAGGTGGC | 185 |
| | | CGTGGAGAAGGAGAAGGTGGAGAAGACTACGCACCAGAAGACCT | |
| | | AGACGACTTGTTCGCCGCCGTCGCAAGAGATACAGAGTAAGGAGA | |
| | | CGGAGGCGGTGGGGAAGGAGACGTGGGCGACGCACATACCTTAG | |
| | | ACGCAGACTTAAAAAAAGAAAGAGACGCAAAAAGCTAAGACTGAC | |
| | | TCAATGGAACCCTAGCACAATTAGAGGATGTACAATTAAGGGAATG | |
| | | GCTCCCCTAATTATCTGTGGCCACACTATGGCAGGCAATAACTTTG | |
| | | CCATCCGAATGGAGGACTATGTCTCTCAAATTAGACCATTCGGAG | |
| | | GGTCGTTTAGCACCACAACCTGGAGCCTTAAAGTACTTTGGGACG | |
| | | AGCACACCAGATTCCATAACACCTGGAGCTACCCAAACACTCAGC | |
| | | TAGATCTCGCAAGGTTTAAAGGAGTAAACTTTTACTTCTACAGAGA | |
| | | CAAAGACACAGACTTTATAGTAACATACAGCTCAGTCCCGCCATTT | |
| | | AAAATGGACAAATACTCATCAGCCATGCTACATCCAGGCACGCTCA | |
| | | TGCAGAGAAAGAAAAAGATATTAATACCCAGCTTTACAACAAGACC | |
| | | AAGGGGCCGAAAAAAAGTTAAACTGCATATAAAACCTCCTGTTTTA | |
| | | TTTGAAGACAAATGGTACACCCAGCAGGACCTCTGCGACGTTAAT | |
| | | CTTTTGTCACTTGCGGTTTCTGCGGCTTCCTTTAGACATCCGTTCT | |
| | | GCCCACCACAAACTGACAACATTTGCATCACTTTCCAGGTGTTGAA | |
| | | AGACTTCTATTACACACAAATGTCAGTTACACCGGACACAGCAGGC | |
| | | CAAGAAAAAGACATTGAAATATTTGAAAAACACTTATTTAAAAATCC | |
| | | ACAATTCTATCAAACTGTCCACACACAAGGAATAATTAGCAAAACA | |
| | | CGAAGAACAGCTAAATTTTCAACCTCAAATAATACCCTAGGAAGTG | |
| | | ACACGAATATAACGCCATACCTAGAACAACCAACAGCAACAAACCA | |
| | | CAAAAACACATTATCCACAGGTAACAACTCAATATATGGCCTTCCA | |
| | | TCTTACAACCCAATACCAGATAAACTTAAAAAAATTCAAGAATGGTT | |
| | | TTGGAAACAAGAAACTGACAAAGAAAATTTAGTTACTGGCTCCTAT | |
| | | CAAACACCTACTAACAAATCAGTAAGCTACCATCTAGGAAAATACA | |
| | | GCCCCATATTTTTAAGCTCATATAGAACTAATCTACAGTTTATAACT | |
| | | GCATACACAGATGTAACATACAATCCCCTAAATGACAAAGGAAAAG | |
| | | GCAACCAAATATGGGTACAGTATGTAACAAAACCAGATACTATATT | |
| | | TAATGAAAGACAGTGCAAATGCCACATAGTAGATATTCCTTTGTGG | |
| | | GCAGCATTCCATGGCTATATTGACTTTATACAAAGTGAACTAGGCA | |
| | | TACAAGAAGAAATACTAAACATTGCCATAATAGTAGTTATATGTCCA | |
| | | TACACAAAACCCAAACTAGTACACGACCCACCAAACCAAAACCAAG | |
| | | GCTTTGTATTCTATGACACACAATTTGGAGACGGTAAAATGCCAGA | |
| | | GGGCTCGGGCCTAGTACCCATATACTACCAAAACAGATGGTATCC | |
| | | TAGAATAAAGTTCCAGAGTCAAGTAGTGCATGACTTTATACTAACA | |
| | | GGCCCCTTTAGCTACAAAGATGATCTAAAGAGCACAGTACTAACAG | |
| | | TAGAATACAAGTTTAAATTCTTATGGGGCGGCAATATGATTCCCGA | |
| | | ACAGGTTATCAGAAACCCTTGTAAAACAGAAGGACACGATCTCCCT | |
| | | CACACCAGTAGACTCCATCGCGACTTACAAGTTGTTGACCCACACA | |
| | | CCGTGGGCCCCCAATGGGCGCTCCACACCTGGGACTGGCGACGT | |
| | | GGACTCTTTGGTTCAGAGGCTATCAAAAGAGTGTCTGAACAACAAG | |
| | | TACATGATGAACTGTATTACCCAGCTTCAAAGAAACCTCGATTCCT | |
| | | CCCTCCAATATCAGGCCTCCAAGAGCAAGAAAGAGACTACAGTTC | |
| | | GCAGGAGGAAAAAGACCAGTCCTCCTCAGAAGAAGAGAAGGACC | |
| | | CGAAGAAAAAAGAGCAAAAACAGCAGCAGCGACTCCACCTCCAGT | |
| | | TCCAAGAGCAGCAGCGACTCGGAAACCAACTCCGACTCATCTTCC | |
| | | GAGAGCTACAGAAAACCCAAGCGGGTCTCCACATAAATCCTATGTT | |
| | | ATCAAACCGGCTATAA | |
| BAB69904.1 | AB060593.1 | ATGGCCTGGAGATGGTGGTGGAGACGGCGCTGGAAGCCAAGAAG | 186 |
| | | GCGGCCAGCGTGGACCAAGTACCGCAGACGCAGGTGGAGACGAC | |
| | | TTCGACCCCGCAGACCTAGAAGACTTGCTCGCGGCCGTCGAAGAA | |
| | | GACGAACAGTAAGGAGGCGGAGGGTCAGGAGACTCAGACGGAGG | |
| | | AGGGGGTGGACTAGGAGACGGTACTTGAGACGCAGAAAGAGACG | |
| | | AAAGCTAATACTGACTCAGTGGAACCCCAATATTGTCAGACGATGC | |
| | | TCTATAAAGGGTATAATCCCCCTCACAATGTGCGGCGCTAACACC | |
| | | GCCAGTTTTAACTATGGGATGCACAGCGACGACAGCACCCCTCAG | |
| | | CCAGAGAAATTTGGGGGAGGCATGAGCACAGTGACCTTTAGCCTG | |
| | | TATGTACTGTATGACCAGTTCACTAGACACATGAACCGGTGGTCTT | |
| | | ATTCCAACGACCAGCTAGACCTGGCCAGATACAGGGGCTGCTCAT | |
| | | TCAAACTGTACAGAAACCCCACAACTGACTTTATAGTGCAGTATGA | |
| | | CAATAATCCTCCTATGAAAAACACTATACTGAGCTCACCTAACACT | |
| | | CACCCAGGTATGCTCATGCAGCAGAAACACAGGATACTAGTGCCC | |
| | | AGCTGGCAGACCTTTCCCAGGGGGAGAAAATATGTTAAAGTTAAG | |
| | | ATACCCCCACCTAAACTCTTTGAGGACCACTGGTACACTCAGCCA | |
| | | GACTTATGCAAAGTTCCGCTCGTTACTCTGCGGTCAACCGCAGCT | |
| | | GACTTCAGACATCCGTTCTGCTCACCACAAACGAACAACCCTTGCA | |
| | | CCACCTTCCAGGTGTTGCGAGAGAACTATAACGAAGTCCTAGGAC | |
| | | TTCCCTATGCTAACACCGGGTCTAACAATGAAGTCAAAATTAAAATT | |
| | | GATAACTTTGAAAACTGGCTTTATAACTCCAGTGTACACTATCAAAC | |
| | | ATTCCAAACAGAGCAAATGTTCAGACCCAAACAATACAATGCAGAT | |
| | | GGCTCTACCTGGAAAGACTACAAAAGCATGTTATCTACATGGACAT | |
| | | CACAAATATATAACAAGAAAACAGACAGCAACTATGGGTATGCCTC | |
| | | CTATGACTTTAGTAAAGGTAAAGAGTTTGCTACACAAATGAGACAG | |
| | | CATTACTGGGTACAACTAACACAACTAACAGCCACAGTCCCACACA | |
| | | TAGGACCTACTTACAGCAACACAACCACACCAGAATACGAATATCA | |
| | | CGCAGGCTGGTACTCTCCAGTGTTCATAGGCCCCAACAGACACAA | |
| | | CATACAGTTCAGAACAGCATACATGGACGTTACCTACAACCCACTA | |
| | | AATGACAAAGGCCAGTTTAACAGAGTATGGTTCCAGTACAGCACTA | |
| | | AACCCACCACAGACTTCAACAACACACAGTGCAAATGTGTTCTAGA | |
| | | AAACATTCCACTGTGGTCAGCCCTATTTGGATACTCTGAATATGTA | |
| | | GAGAGCCAGCTAGGCCCCTTCCAGGACCACGGGACCGTGGGTGT | |
| | | AGTAGTAGTACAATGTCCTTACACAGTGCCACCCATGTATAACAAA | |
| | | GAGAAACCAGACATGGGCTACGTATTCTATGACACACATTTTGGCA | |
| | | ATGGCAAATTGGGCAACGGCAGCGGCCAGGTACCCAGGTACTGG | |
| | | CAGATGAGATGGTACCCCATACTCAAAAGACAAAAACAAGTAATGA | |
| | | ATGACATTTGCAAGACTGGACCGTTCAGCTACAGAGACGAACTGC | |
| | | TTCAGGTGGACTTAGCAAGCCCCTACACCTTCAGATTTAACTGGG | |
| | | GGGGCGACTTACTCTACCACCAGGTCATCAAAGACCCGTGCAGCT | |
| | | CCTCAGGACTGGCACCTACCGACTCCAGTAGATTCAAGCGGGATG | |
| | | TACAAGTCGTTAGCCCGCTCACAATGGGGCCCCGACTGCTATTCC | |
| | | ACTCGTTCGACCAAAGACGAGGGTTCTTTACTCCAGGAGCTATCAA | |
| | | ACGAATGCATGATGAACAAATTAATGTTCCAGACTTTACACAAAAA | |
| | | CCTAAAATCCCGCGAATTTTCCCACCAGTCGAGCTCCGAGAAAGA | |
| | | GCAGAAGCCGAAGAAGACTCAGGTTCGGAAAAAGCGTCGTTCACC | |
| | | TCGTCGCAAGAGAGAGAAGCCGAAGCCCAAGAAAAGTTACCGATA | |
| | | CAGCTCCAGCTCAGACAGCAGCTCAGACAACAACAGCAGCTCCGA | |
| | | GTCCACTTGCAGCAAGTCTTCCTCCAACTCCAAAAAACGAAGGCA | |
| | | CATTTACATATAAACCCACTATTTTTGGCCCAAGGGAACATGTAA | |
| BAB69912.1 | AB060595.1 | ATGGCCTACTCCTACTGGTGGCGCCGCCGGAGGTGGCCGTGGAG | 187 |
| | | AGGCCGATGGAGGCGCTGGAGGCGCCGCAGACGAATACCGCGC | |
| | | CGAAGACCTAGACGACCTGTTCGCCGCTATCGAAGGAGACCAGTA | |
| | | AGGAGAAAGCGTCGGTGGGGGAGGCGAGGGCGACGGCGCCGGT | |
| | | ACACTAGACGGTACAGACGCAGACTGACTGTCAGACGAAAGAGAA | |
| | | ACAAACTCAGACTGAGCGTATGGCAGCCCCAGAATATCAGATACT | |
| | | GTGCCATAAAAGGCCTCTTTCCCATCCTCATCTGCGGGCACGGAA | |
| | | AGAGCGCCGGCAACTATGCCATCCACTCGGATGACTTTATCACAA | |
| | | GCAGATTCTCTTTCGGAGGTGGTCTCAGCACGACCTCCTACTCTCT | |
| | | GAAGCTGCTATTCGACCAAAACCTCAGGGGACTAAACAGATGGAC | |
| | | CGCTAGCAACGACCAGCTAGACCTAGCTAGGTACCTGGGGGCCAT | |
| | | ATTCTGGTTCTACAGAGACCAGAAAACAGACTACATAGTCCAGTAT | |
| | | GACATCTCAGAGCCCTTCAAGATAGACAAAGACAGCTCCCCTTCCT | |
| | | TCCATCCAGGCATACTGATGAAAAGCAAACACAAAGTACTGGTACC | |
| | | CAGCTTCCAGACTTGGCCCAAGGGTCGCTCTAAAGTAAAGCTAAA | |
| | | GATAAAGCCCCCCAAGATGTTCGTTGACAAATGGTACACACAAGA | |
| | | GGATCTCTGTACCGTTACTCTTGTGTCACTTGTGGTCAGCCTAGCT | |
| | | TCCTTTCAACATCCGTTCTGCCGACCACTAACTGACAACCCTTGCG | |
| | | TCACCTTCCAAGTTCTGCAAAATTTCTACAACAACGTAATAGGCTA | |
| | | CTCCTCATCAGACACACTAGTAGATAATGTCTTTACGAGTCTGTTAT | |
| | | ACTCTAAAGCCTCCTTCTGGCAGAGCCATCTGACCCCCTCTTATGT | |
| | | CAAAAAAATTAACAACAACCCCGATGGCAGCTCAATTAGTCAGCGA | |
| | | GTAGGCACAATGCCTGACATGACGGAGTATAACAAGTGGGTATCC | |
| | | AACACAAATATAGGAACAGGATTCGTAAACTCAAATGTTAGTGTAC | |
| | | ACTATAATTATTGTCAGTACAACCCTAACCATACTCATTTAACAACA | |
| | | CTGAGACAGTACTACTTCTTTTGGGAAACACACCCAGCAGCGGCC | |
| | | AACAAAACACCTGTAACACACGTCCCCATCACCACCACAAAACCCA | |
| | | CCAAAGACTGGTGGGAGTACAGATTAGGCCTGTTCAGTCCCATCT | |
| | | TCCTATCTCCACTCAGAAGCAGCAACATAGAGTGGCCCTTCGCATA | |
| | | CAGAGACATAATATACAACCCACTCATGGACAAGGGGGTAGGTAA | |
| | | CATGATGTGGTACCAGTACAACACAAAACCAGATACCCAGTTCTCC | |
| | | CCCACCTCTTGCAGAGCAGTGCTAGAAGACAAACCCATATGGTCC | |
| | | ATGGCATATGGGTATGCAGACTTTCTGCTGTCCATACTAGGTGAAC | |
| | | ACGACGATGTAGACTTCCATGGATTAGTCTGTATCATATGCCCCTA | |
| | | CACCAGACCGCCCCTCTTCGACAAGGATAACCCCAAGATGGGCTA | |
| | | TGTCTTCTACGATGCTAAATTTGGCAATGGCAAATGGATAGACGGT | |
| | | ACGGGATTCATCCCGGTAGAGTTCCAGAGTAGATGGAAACCAGAG | |
| | | CTGGCCTTCCGGAAAGACGTACTGACTGACTTAGCCATGTCAGGC | |
| | | CCCTTCTCCTACAGCGACGACCTTAAAAACACCACAATCCAGGCC | |
| | | AAGTACAAATTCAAATTCAAATGGGGCGGTAATCTCTCTTACCACC | |
| | | AGACGATCAGAAACCCGTGCACCTCGGACGGACAGACGCCCACA | |
| | | ACCAGTAGACAGTCTAGAGAGGTACAAATCGTTGACCCGCTCACC | |
| | | ATGGGACCCCGATACGTATTCCACTCGTGGGACTGGCGACGTGG | |
| | | GTGGCTTAATGACAGAACTCTCAAACGCTTGTTCCAAAAACCGCTC | |
| | | GATTTTGAAGAGTATCCAAAATCTCCAAAGAGACCTAGAATTTTCC | |
| | | CACCCACAGAGCAGCTCCAAGAAGACCCGCAAGAGCAAGAAAGA | |
| | | GACTCCTCTTCTTCGGAAGAAAGTCTCCCTACATCGTCAGAAGAGA | |
| | | CACCGCCAGCCCACCTACTCAGAGTACACCTCAGAAAGCAGCTCC | |
| | | GGCAACAGCGAGACCTCCGAGTCCAGCTCAGAGCCCTGTTCGCC | |
| | | CAAGTCCTCAAAACGCAAGCGGGCCTACACATAAACCCCCTCTTAT | |
| | | TGGCCCCGCAGTAA | |
| BAB79314.1 | AB064596.1 | ACGGCCTGGTGGTGGGGAAGACGGTGGCGACGCCGCCCGTGGG | 188 |
| | | GCCGCTGGCGCCGCCGAAGGCGCGTATGGAGAAGAAGACCTAGA | |
| | | ACTGCTGTTCGCCGCCGCCGAGGAAGACGATATGTGAGTAGAAG | |
| | | GCGCCGCTACAGGCGCAGACTCAGACGAAGGGGCAGACGGAGAT | |
| | | ACAGGGGGCGACGAAAGAAGAGACAGACCCTAGTACTCAAACAAT | |
| | | GGCAACCCGACGTTAACAGACTGTGCAGAATCACAGGATGGCTAC | |
| | | CTCTTATAGTTTGTGGCACCGGCAGGGCCCAGGACAACTTTATAG | |
| | | TACACTCAGAGGACATAACCCCCCGAGGAGCCGCCTACGGGGGC | |
| | | AACCTCACACACATAACATGGTGCTTAGAAGCTATATACCAAGAAT | |
| | | TCCTCATGCACAGAAACAGATGGTCCAGAAGTAACCATGACCTGG | |
| | | ACCTCTGCAGATACCAAGGAGTAGTTTTTAAGGCCTATAGACACCC | |
| | | CAAAGTTGACTACATACTAGCATACACAAGAACACCTCCATTTCAA | |
| | | GCAACAGAACTTAGCTACATGTCCTGCCATCCACTACTCATGCTGA | |
| | | CAGCAAAACACAGGATAGTAGTAAAGAGCCAAGAGACCAAAAAAG | |
| | | GGGGCAAAAAATATGTAAAATTTAGAATAAAGCCCCCCAGACTAAT | |
| | | GTTAAACAAGTGGTACTTCACTCATGACTTTTGTAAAGTCCCACTAT | |
| | | TCAGCATGTGGGCCTCAGCCTGTGATCTAAGAAATCCCTGGCTAA | |
| | | GAGAGGGAGCCCTAAGCCCCACAGTAGGCTTTTTTGCCTTAAAGC | |
| | | CTGACTTCTACCCTAATTTAAGCATTTTACCAAATGAAGTCAGTCAA | |
| | | CAATTCGACTTCTTTTTAAACTCTGCTCACCCACCAAGCATACAATC | |
| | | AGAAAAAGATGTTAGATGGGAATATACATACACAAACTTAATGAGG | |
| | | CCTATATACAACCAGACCCCATCACTAAAGGCCTCCACATATGACT | |
| | | GGCAAAACTATAGCAATCCAAACAACTATCAAGCATGCCACCAACA | |
| | | ATTCATAGCATTTAAAGCACAAAGATTTGCCAAAATTAAAGCAGAAT | |
| | | ATCAAACAGTATATCCTACACTAACAACACAGACACCCCAATCAGA | |
| | | AGCACTAACACAAGAATTTGGACTATACTCTCCATACTATTTAACAC | |
| | | CAACAAGAATCAGCCTAGACTGGCACACAGTATTCCACCACATCA | |
| | | GATACAACCCGATGGCAGACAAAGGCCTAGGAAACATGATTTGGG | |
| | | TCGACTGGTGTTCCAGAAAAGAAGCCACCTACGACCCCACAAGAT | |
| | | CCAAGTGCATGCTAAAAGACCTACCACTATACATGCGCTTCTATGG | |
| | | CTACTGTGACTGGGTAACTAAATCAATAGGCTCAGAAACAGCCTG | |
| | | GAGAGACATGAGATTAATGGTGGTCTGCCCTTATACAGAACCCCA | |
| | | ACTAATGAAAAAAAATGACAAAACCTGGGGCTATGTAATCTATGGC | |
| | | TACAACTTTGCAAACGGAAACATGCCGTGGTTACAGCCATATATCC | |
| | | CAATCTCGTGGTTTTGCCGTTGGTTCCCTTGCATCACTCACCAACG | |
| | | TGAAGCAATGGAGTCAGTTGTGGCCACAGGACCGTTCATGGTCAG | |
| | | AGACCAAGACCGCAACAGTTGGGACATAACTATAGGCTACAAATTC | |
| | | TTATGGAGATGGGGGGGCTCTCCTCTGCCCACTCAGGCAATCGAC | |
| | | GACCCCTGCCAGCAGGGAACCCACCCGCTTCCCGAGCCCGGTAC | |
| | | GTTGCCTAGAATCTTACAAGTCAGCGACCCGACGCAACTCGGACC | |
| | | GAAAACCATATTCCACCTCTGGGACCAGAGGCGTGGACTTTTTAG | |
| | | CAAAAGAAGTATTGAAAGAATGTCAGAATACAAAGGAACTGATGAC | |
| | | TTATTTTCACCAGGTCGCCCAAAGCGCCCAAAGCTCGACACACGT | |
| | | CCCGAAGGACTACCAGAGGAGCAAAGAGGAGCTTACAATTTACTC | |
| | | CAAGCCCTCGAAGACTCAGCCCAGTCGGAAGAAAGCGACCAAGA | |
| | | AGAAATGCCTCCCCTCGAAGAAGAACAAGTACTCCACGAGCAAAA | |
| | | GAAAGAGGCGCTCCTCCAGCAGCTCCAGCAGCAGAAACACCACC | |
| | | AGCGAGTCCTCAAGCGAGGCCTCAGACTCCTCCTCGGAGACGTC | |
| | | CTGAAACTCCGCCGGGGTCTACACATAGACCCGGTCCTTACATAG | |
| BAB79318.1 | AB064597.1 | ACGGCGTGGTGGTGGGGACGGTGGCGCCGCCGCTGGCGCCGCA | 189 |
| | | GGCGACCGTGGAGACCGAGACTACGACGAAGAAGAGCTAGACGA | |
| | | GCTTTTCCGCGCCGCCGCCGAAGACGATTTGTAAGTAGGAGATGG | |
| | | CGCCGGCCTTACAGGCGCAGGAGGAGACGCGGGCGACGCAGAC | |
| | | GCAGACGCAGACGCAGACATAAGCCCACCCTAGTACTCAGACAGT | |
| | | GGCAACCTGACGTTATCAGACACTGTAAGATAACAGGACGGATGC | |
| | | CCCTCATTATCTGTGGAAAGGGGTCCACCCAGTTCAACTACATCAC | |
| | | CCACGCGGACGACATCACCCCCAGGGGAGCCTCCTACGGGGGCA | |
| | | ACTTCACAAACATGACTTTCTCCCTGGAGGCAATATACGAACAGTT | |
| | | TCTGTACCACAGAAACAGGTGGTCAGCCTCCAACCACGACCTCGA | |
| | | ACTCTGCAGATACAAGGGTACCACCCTAAAACTGTACAGGCACCC | |
| | | AGATGTAGACTACATAGTCACCTACAGCAGAACGGGACCCTTTGA | |
| | | GATCAGCCACATGACCTACCTCAGCACTCACCCCCTTCTCATGCT | |
| | | GCTAAACAAACACCACATAGTGGTGCCCAGCCTAAAGACTAAGCC | |
| | | CAGGGGCAGAAAGGCCATAAAAGTCAGAATAAGACCCCCCAAACT | |
| | | CATGAACAACAAGTGGTACTTCACCAGAGACTTCTGTAACATAGGC | |
| | | CTCTTCCAGCTCTGGGCCACAGGCTTAGAACTCAGAAACCCCTGG | |
| | | CTCAGAATGAGCACCCTGAGCCCCTGCATAGGCTTCAATGTCCTT | |
| | | AAAAACAGCATTTACACAAACCTCAGCAACCTACCTCAGCACAGAG | |
| | | AAGACAGACTTAACATTATTAACAACACATTACACCCACATGACATA | |
| | | ACAGGACCAAACAATAAAAAATGGCAGTACACATATACCAAACTCA | |
| | | TGGCCCCCATTTACTATTCAGCAAACAGGGCCAGCACCTATGACTT | |
| | | ACTACGAGAGTATGGCCTCTACAGTCCATACTACCTAAACCCCACA | |
| | | AGGATAAACCTTGACTGGATGACCCCCTACACACACGTCAGGTAC | |
| | | AATCCACTAGTAGACAAGGGCTTCGGAAACAGAATATACATACAGT | |
| | | GGTGCTCAGAGGCAGATGTAAGCTACAACAGGACTAAATCCAAGT | |
| | | GTCTCTTACAAGACATGCCCCTGTTTTTCATGTGCTATGGCTACAT | |
| | | AGACTGGGCAATTAAAAACACAGGGGTCTCCTCACTAGCGAGAGA | |
| | | CGCCAGAATCTGCATCAGGTGTCCCTACACAGAGCCACAGCTGGT | |
| | | GGGCTCCACAGAAGACATAGGGTTCGTACCCATCACAGAGACCTT | |
| | | CATGAGGGGCGACATGCCGGTACTTGCACCATACATACCGTTGAG | |
| | | CTGGTTTTGCAAGTGGTATCCCAACATAGCTCACCAGAAGGAAGTA | |
| | | CTTGAGGCAATCATTTCCTGCAGCCCCTTCATGCCCCGTGACCAG | |
| | | GGCATGAACGGTTGGGATATTACAATAGGTTACAAAATGGACTTCT | |
| | | TATGGGGCGGTTCCCCTCTCCCCTCACAGCCAATCGACGACCCCT | |
| | | GCCAGCAGGGAACCCACCCGATTCCCGACCCCGATAAGCACCCT | |
| | | CGCCTCCTACAAGTGTCGAACCCGAAACTGCTCGGACCGAGGACA | |
| | | GTGTTCCACAAGTGGGACATCAGACGTGGGCAGTTTAGCAAAAGA | |
| | | AGTATTAAAAGAGTGTCAGAATACTCATCGGATGATGAATCTCTTG | |
| | | CGCCAGGTCTCCCATCAAAGCGAAACAAGCTCGACTCGGCCTTCA | |
| | | GAGGAGAAAACCCAGAGCAAAAAGAATGCTATTCTCTCCTCAAAG | |
| | | CACTCGAGGAAGAAGAGACCCCAGAAGAAGAAGAACCAGCACCC | |
| | | CAAGAAAAAGCCCAGAAAGAGGAGCTACTCCACCAGCTCCAGCTC | |
| | | CAGAGACGCCACCAGCGAGTCCTCAGACGAGGGCTCAAGCTCGT | |
| | | CTTTACAGACATCCTCCGACTCCGCCAGGGAGTCCACTGGAACCC | |
| | | CGAGCTCACATAG | |
| BAB79326.1 | AB064599.1 | ACGGCGTGGTGGAGATACAGACGGAGACCGTGGAGAAGATGGAG | 190 |
| | | GAGACGCCGCTGGGGCCTACGAACCCGAAGACCTAGAAGAACTTT | |
| | | TCGCCGCCGCCGAGCAAGACGATATGTGAGTAGAGGGCGGCGCC | |
| | | GCCGATACAGGCGCAGACGCAGACGGGGGCGACGCAGACGGGG | |
| | | ACGCAGACGCAGGCACAGAAAGACTCTCATTGTCAGGCAATGGCA | |
| | | ACCAGACGTTATAAAGAGATGCTTTATCACAGGGTGGCTGCCCCT | |
| | | CATTATCTGTGGAAACGGACACACCCAATTTAACTTTATAACTCACA | |
| | | TGGATGACATTCCACCCAAGAATGCATCCTACGGGGGCAACTTCA | |
| | | CCAACTTGACCTTTAACCTAGCCTGCTTCTATGACGAATTCATGCA | |
| | | CCACAGAAACAGATGGTCAGCCTCTAACCATGACCTAGAGCTAGT | |
| | | GAGATACATCAGAACCAGCCTTAAACTCTACAGACACGAGTCAGTA | |
| | | GACTATATAGTGTGCTACACCACCACAGGCCCCTTCGAGACAAAT | |
| | | GAAATGTCCTACATGCTCACTCACCCTCTGGCCATGCTCCTCAGCA | |
| | | AAAGACACGTAGTTGTGCCTAGCCTAAAAACAAAACCACACGGCA | |
| | | GAAAGTACAAAAAGATAACAATTAAGCCCCCAAAACTGATGCTAAA | |
| | | CAAGTGGTACTTTGCTACAGACCTCTGCCACATAGGCCTCTTCCAG | |
| | | CTCTGGGCCACAGGCCTAGAGCTTAGAAATCCATGGCTCAGATCA | |
| | | GGCACAAACAGCCCTGTTATAGGCTTCTATGTCCTTAAAAACCAAG | |
| | | TTTACAAAAACAGATACAGCAACCTAAACACAACAGAAGCACACAA | |
| | | CGCCAGACAAGACGCATGGAACGAACTAACCCAAACAAAAACTAA | |
| | | CGACAAATGGTACAATTGGCAATATACATACAATAAACTTATGAAG | |
| | | CCAATTTACTATGCAGCTTCAAATGAAAGTAGTAATTCAGCCATGA | |
| | | AAGGAAAAACATATAATTGGAAACATTACAAAGAATATTTTAGCAAC | |
| | | ACACAAACTAAGTGGAAAACAATTATTAAAGACGCCTATGACTTAG | |
| | | TAAGAGAGGAATACCAACAATTATACACCACAACTATGGCATATCC | |
| | | ACCACCATGGCAATCAACCACTTCTAATACAGGCAGACAATACCTA | |
| | | GAACATGACTGTGGCATTTACAGCCCATACTTTCTAACACCACAAA | |
| | | TATATAGCCCAGAATGGCACACAGCCTGGTCCTACATCAGATACAA | |
| | | TCCCCTCACAGACAAAGGCATAGGAAACAGAGTCTGTGTCCAGTA | |
| | | CTGCAGCGAGGCCAGCAGCGACTACAACCCAATAAAGAGCAAGTG | |
| | | TATGTTACAAGACATGCCCTTGTGGATGATGCTGTATGGCTACGCA | |
| | | GACTATGTAGTAAAGAGCACAGGCATACAGTCAGCCTGGACAGAC | |
| | | ATGAGAGTGGCCATCAGATGTCCCTACACAGACCCTAAGCTTGTG | |
| | | GGCAGCACAGAAAACACCATGTTTATCCCCATAGGCCTAGAATTCA | |
| | | TGAACGGAGACATTCCAGACAAAAGGCCCTACATTCCGTTAACCT | |
| | | GGTGGTTTAAGTGGTACCCCATGATTACACACCAGAAAACCGCAAT | |
| | | TGAGGCAATAGTTTCCTGCAGCCCCTTCATGCCCAGAGATCAGGA | |
| | | ACAAGCTAGTTGGGACATAACTGTAGGTTACAAAGCAACCTTCTTA | |
| | | TGGGGCGGGTCCCCGTTACCTCCACAGCCCATTGACGACCCCTG | |
| | | CCAAAAAGGAAAACACGACATTCCCGACCCCGATACAAACCCTCC | |
| | | AAGAATACAAATATCAGACCCGCAACACCTCGGACCGGCGACGCT | |
| | | GTTCCACTCGTGGGACCTCAGACGTGGATATATTAATACAAAAAGT | |
| | | ATTAAAAGAATCTCAGAACACCTCGATGCTAATGAATATTTTTCGAC | |
| | | AGGCGTCGTGTCCAAAAAACCCCGATTCGACACTCCCCACCACGG | |
| | | GCAGCTATCAAACCAAGAAGAAGACGCCTTGTCTATCCTCAGACAA | |
| | | CCCCAAAAAGAGCAAGAAGAGACCACCTCCGAGGAAGAACAAGCA | |
| | | CTCCAAAAAGAAGAGGAGCAAAAAGAAAAGCTCCTACAGCAACTC | |
| | | AGAGTCCAGCGACAGCACCAGCGAGTCCTCAGACAGGGAATCAAA | |
| | | CACCTCATGGGAGACGTCCTCCGACTCAGACAGGGAGTCCACTG | |
| | | GAACCCAGTCCTATAA | |
| BAB79330.1 | AB064600.1 | ACGGCCTGGGGATGGTACCGGAGAAGAAGATGGCGCCCATGGAG | 191 |
| | | AAGGAGAAGGTGGGCGATACGCAGAAGAAGACCTAGAAGAACTG | |
| | | TTCGCCGCCGCGGCAGAAGACGATATGTGAGTAGATGGCCGCGC | |
| | | CGCCGATACAGGCGCAGACGCAGACGAACCAGACGTAGGGGGG | |
| | | GACGCAAAAGGAGACACAGACAGACTCTTATACTCAGACAGTGGC | |
| | | AACCAGATGTTATGAAAAAATGTTTTATTACTGGCTGGATGCCCCT | |
| | | CATTATATGTGGCACTGGGAACACTCAATTTAACTTTATAACCCATG | |
| | | AAGACGATGTGCCACCAAAAGGAGCCTCCTATGGAGGCAACCTCA | |
| | | CTAACCTCACCTTCACTCTAGAAGGACTGTATGACGAACACCTACT | |
| | | CCACAGAAACAGGTGGTCCAGATCAAACTTTGATCTAGACCTCAG | |
| | | CAGATACCTCTACACTATAATAAAGCTATACAGACACGAGTCTGTA | |
| | | GACTACATAGTCACCTACAACAGAACAGGCCCCTTTGAAATAAGCC | |
| | | CACTCAGCTACATGAACACACACCCTATGCTAATGCTCCTAAACAA | |
| | | GCACCACGTAGTGGTGCCAAGCCCAAAAACAAAGCCCAAAGGCAA | |
| | | GAGGGCCATTAAAATTAAAATAAAGCCACCTAAACTAATGCTAAAC | |
| | | AAATGGTACTTTGCAAGAGACACGTGTAGAATAGGCCTCTTTCAGC | |
| | | TCTATGCCACAGGGGCTAACCTAACAAACCCCTGGCTCAGGTCAG | |
| | | GCACAAACAGCCCTGTAGTGGGATTCTATGTAATTAAAAACTCCAT | |
| | | ATATCAAGACGCCTTTGATAACCTGGCAGACACAGAACATACAAAC | |
| | | CAAAGAAAAAATGTATTTGAAAACAAACTATATCCCACTACAACAAC | |
| | | TAACAAAGACAACTGGCAATACACATACACATCCCTCATGAAAAAC | |
| | | ATATACTTTAAAACAAAACAAGAAGCAGAAAACCAAACAATGAGTA | |
| | | GCACATACAACTTTGACACATACAAAACAAACTATGACAAAGTAAG | |
| | | AACTAAATGGATAAAAATAGCTGAAGATGGCTATAAACTAGTATCA | |
| | | AAAGAATACAAAGAAATATACATCAGTACAGCCACATACCCTCCAC | |
| | | AATGGAATTCAAGAAACTACCTTAGCCATGACTATGGCATTTATAG | |
| | | TCCTTACTTTTTAACACCCCAAAGATACAGCCCCCAATGGCACACA | |
| | | GCATGGACATATGTCAGATACAACCCACTAACAGACAAAGGCATA | |
| | | GGCAACAGAATATTTGTTCAGTGGTGCTCAGAAAAAAACAGCTCAT | |
| | | ACAACAGCACAAAAAGCAAGTGCATGCTACAAGACATGCCCCTTTT | |
| | | TATGCTAACCTATGGGTACCTAGACTATGTACTAAAATGCGCAGGC | |
| | | TCTAAATCAGCCTGGACAGACATGAGAGTCTGTATCAGAAGCCCAT | |
| | | ACACAGAACCACAGCTTACAGGCAACACAGATGATATTAGTTTTGT | |
| | | TATAATATCAGAGGCCTTCATGAACGGGGACATGCCCTACCTAGCT | |
| | | CCACACATACCCGTTAGTCTGTGGTTTAAGTGGTACCCCATGATAT | |
| | | TACACCAGAAGGCAGCTTTAGAAACCATAGTTTCCTGTGGACCGTT | |
| | | TATGCCCAGAGACCAGGAAGCCAACTCTTGGGACATAACCGCAGG | |
| | | TTACAAAGCAGTTTTTAAGTGGGGTGGGTCCCCTCTGCCTCCACA | |
| | | GCCTATCGACGACCCCTACCAAAAACCCACCCACGAAATACCCGA | |
| | | CCCCGATAAGCACCCTCCAAGACTACAAATTGCAGACCCGAAAAT | |
| | | CCTCGGACCGTCGACAGTCTTCCACACATGGGACATCAGACGTGG | |
| | | CCTCTTTAGCACAGCAAGTCTTAAGAGAGTGTCAGAATACCAACCG | |
| | | CCTGATGACCTTTTTTCAACAGGCGTCGCATCCAAAAGACCCCGAT | |
| | | TCGACACTCCAGTCCAAGGGCAGCTCGAAAGCCAAGAAGAAGAAA | |
| | | GCTATCGTTTACTCAGAGCACTCCAAAAAGAGCAAGAGACAAGCA | |
| | | GCTCGGAAGAGGAGCAGCCACAAAACCAAGAGATCCAAGAAAAAC | |
| | | TACTCCTCCAGCTCCAGCAGCAGCGACAACAGCAGCGACTCCTCG | |
| | | CAAAGGGAATCAAGCACCTCCTCGGAGATGTCCTCCGACTCCGAA | |
| | | AAGGAGTCCACTGGGACCCGGTCCTTACATAG | |
| BAB79334.1 | AB064601.1 | ACGGCGTGGTACAGAAGAAGAAGGTGGAGACCGTGGAGAAGACG | 192 |
| | | CCGCAGACCGTGGACCCTACGCAGAAGAAGAGCTAGAAGATTTGT | |
| | | TCGCCGCCGCCCGAGAAGACGATATGTGAGTAGATGGCGGCGCC | |
| | | GCCGATACAGGCGCAGACTAAGACGGGGGAGACGACGAAGGGG | |
| | | ACGCAGACGCAGAAAAGAAACTATAATAGTGAGACAGTGGCAGCC | |
| | | AGATGTAATGAGAAACTGTTATATTACTGGCTTCCTACCTCTCATAG | |
| | | TCTGTGGCTCAGGCAACACTCAATTTAACTTTATCACACATGAGAA | |
| | | TGACATACCCCCAAGGGGAGCCTCCTATGGGGGCAACCTCACCAA | |
| | | CATAACCTTCACCCTAGCGGCACTATATGACCAGTACTTGCTACAC | |
| | | AGAAACAGGTGGTCCAGGTCAAACTTTGACCTAGACCTAGCCAGA | |
| | | TACATTAACACAAAACTAAAACTATACAGACATGACTCAGTAGACTA | |
| | | CATAGTAACCTACAACAGAACAGGTCCCTTTGAGGTGAATCCACTA | |
| | | ACATACATGCACACTCACCCCCTACTCATGCTCGTGAACAGGCAC | |
| | | CACATAGTGGTGCCCAGTTTAAAAACAAAACCCAGAGGCAAAAGA | |
| | | TACATAAAAGTAAAAATAAAGCCTCCAAAACTAATGCTAAACAAGT | |
| | | GGTACTTTGCGAAAGACATCTGCCCACTAGGCCTCTTCCAGCTATA | |
| | | TGCTACCGGCCTAGAACTCAGAAACCCCTGGATCAGAGAGGGCAC | |
| | | AAACAGCCCCATAGTAGGGTTTTATGTTTTAAAACCCTCACTATATA | |
| | | ATGGAGCCATGTCAAACTTAGCAGACACAGAACATTTAAACCAAAG | |
| | | ACAAACCCTATTTAACAAACTACTTCCAACACAAAACCAAAAAGAC | |
| | | GAATGGCAATACACATACAACAAACCAATGCAAAAAATATATTATG | |
| | | AAGCAGCAAACAAGCAAGATAGTGGCTTTAAAAATACAACATATAA | |
| | | CTGGACAAACTACAAAACTAACTACCAAAAAGTACAATCACAATGG | |
| | | CAAACTGTAGCACAACAAAACTACAACCAAGTATACAATGAATTTA | |
| | | AAGAGGTATACCCACTAACAGCTACATGGCCACCGCAATGGAATG | |
| | | CTAGACAATACATGTCACACGACTTTGGCATATACAGCCCATACTT | |
| | | TTTGTCACCTGCAAGATTTACAGACTACTGGCACAGTGCATACACC | |
| | | TATGTCAGATACAACCCCATGTCAGACAAAGGCATAGGTAACATAA | |
| | | TCTGCATACAATGGTGCAGTGAAAAAAACAGTGAATTTAATGAGAC | |
| | | TAAAAACAAGTGCATACTAAGAGACATGCCACTTTACATGCTAACA | |
| | | TATGGCTACCTAGACTATACCACAAAATGCACAGGCTCCAACTCCA | |
| | | TCTGGACAGACGCCAGAGTAGCCATCAGATGTCCATACACAGATC | |
| | | CCCCACTATCAAATCCAACTAACAAAAACACACTTTATATTCCACTA | |
| | | TCTACATCTTTCATGCAAGGAGACATGCCCTGGCCAACCACAAACA | |
| | | TTCCGTTAAAGATGTGGTTTAAGTGGTATCCCATGATCATGCACCA | |
| | | GAGGGCCTGTTTAGAAACCATAGTTTCCTGTGGACCGTTTATGCCC | |
| | | AGAGACCAAACCGCAAGCAGTTGGGACATAACTATTGCATACAGA | |
| | | GCCTTTTTTAAATGGGGTGGCAATCCTCTGCCTCCACAGCCCATC | |
| | | GACGACCCCTGCCAAAAAGACACCCACGAAATACCCGACCCCGAT | |
| | | AAACACCCTAGAGGAATACAAATATCAGACCCGAAGGTACTCGGA | |
| | | CCACCCACAGTCTTCCACACATGGGACATCAGACGTGGACTGTTT | |
| | | AGCTCGACGAGTCTTAAAAGAGTGTCAGAATACCAACCGCCTGAT | |
| | | GACCCTTTTTCAACAGGCGTCGTCTTCAAAAGACCCCGACTGGAA | |
| | | ACCCAGTACAAAGGAACCCAAGAAACCCCAGAAGAAGACGCCTAC | |
| | | ACTTTACTCAAAGCACTCCAAAAAGAGCAAGAGAGCAGCAGCTCG | |
| | | GAAGAAGAACTCCCACAAGAAGAGCAAGAGATCCAAAAAACACAA | |
| | | CTCCTCAAGCAGCTCCAACTCCAGCAGCAGCAACAGCGAATCCTC | |
| | | AAGAGGGGAATCAGACACCTCTTCGGAGACGTCCTCCGACTCAGA | |
| | | AAAGGAGTCCACTCCAACCCAGACCTATTATAA | |
| BAB79338.1 | AB064602.1 | ACGGCCTGGTACCGGTACAGAAGAAGGCCATGGCGCCGAAGGAG | 193 |
| | | GCGACCGAGGTGGGGCCTACGCAGAAGAAGATTTAGAAGATCTTT | |
| | | TCGCGGCCGCGGAAGAAGACGATATGTGAGTAGATGGTCGCGCC | |
| | | GCCGATACAGGCGCAGACGGAGAAGGGGGCGACGTAGACGGGG | |
| | | ACGCAGACGAAGAAAGAGACAGACTCTTATACCGAGACAGTGGCA | |
| | | GCCAGATGTTACTAAAAAGTGCTTCATTACTGGCTGGATGCCCTTA | |
| | | ATAATCTGTGGGACTGGACACACACAATTTAACTTTATAACCCACG | |
| | | AAGAGGATATCCCCGGTGCAGGAGCCTCCTATGGAGGAAACCTTA | |
| | | CAAACATTACCATTACTCTGGGAGGGCTATATGAACAATATATGCT | |
| | | TCACAGAAACCACTGGTCCAGAAGCAACTATGACCTAGAGCTGGC | |
| | | CAGATACCTAGGCTTCACCCTAAAATGCTACAGACATGCAACAGTA | |
| | | GACTATATACTTACATACAGCAGAACAACACCCTTTGAGACCAATG | |
| | | AACTGAGCCACATGCTAACTCACCCCTTACTAATGCTACTAAACAA | |
| | | ACATCACAGAGTAATACCCAGCTTAAAAACAAGGCCAAAAGGAAAA | |
| | | AGGTCAGTTAGAATCCACATTAAACCCCCAAAACTAATGATAAACA | |
| | | AATGGTACTTTGCAAAAGACCTCTGTAACATAGGACCCTGTCAAAT | |
| | | ATATGCCACAGGCCTAGAACTCTCAAACCCCTGGCTAAGATCAGG | |
| | | CACAAACAGCCCTGTAATAGGCTTTTGGGTACTTAAAAATCACCTA | |
| | | TATGATGGCAACCTCTCAAACATAGCCTCAGGTGAACAATTAACAG | |
| | | CCAGACAAACTCTATTTACAACTAAATTACTCCCAAGTAATAACACC | |
| | | AAAGACGAATGGCAATACGCCTATACCCCACTAATGAAAACATTCT | |
| | | ACACACAAGCAGCCAACACAGCAGCACATAACATAACAGACAAAA | |
| | | CATACAACTGGAAAAACTACAAAACTCACTATGACAAAGTACAACA | |
| | | AACATGGACAACAAAAGCACAATTTAATTATGACTTAGTTAAAGAA | |
| | | GAATACAAAACGGTATATCCAACCACAGCTACATTCCCACCAGAGT | |
| | | GGTCAAACAGACAATATCTAGAACATGACTATGGCTTATTCAGCCC | |
| | | TTATTTTCTAACACCAAACAGATACAGCACAGAGTGGCACATGCCA | |
| | | ATTACCTATGTTAGATACAACCCACTAGCAGACAAAGGCATAGGCA | |
| | | ACAGAATATACATGCAGTGGTGCTCAGAAAGCAGCAGCAGCTTTG | |
| | | AGCCCACCAAAAGCAAGTGCATGCTACAAGACATGCCACTATACAT | |
| | | GCTCACATATGGATACCTAGACTATGTTGTTAAATGCACAGGTGTT | |
| | | AAATCAGCCTGGACAGACATGAGAGTGGCCATTAGAAGCCCCTAC | |
| | | ACCTTTCCTCAACTAATAGGCAGCACAGATAAAGTGGGCTTCATCC | |
| | | CCCTAGGTGAAAAATTCATGAGCGGAGACACAGACCCCGTTAAAA | |
| | | ACTTTATACCGTTAAAGTATTGGTACAGATGGTATCCGTTTGCGGC | |
| | | TAACCAAAAGTCAGTTTTAGAAACCATAGTTTCCTGTGGCCCCTTC | |
| | | ATGCCCAGAGATCAGGAAGCAGGCTCTTGGGACATAACTGTAGGT | |
| | | TACAAAGCAACCTTTAAACGGGGGGGCTCCCCTCTACCTCCACAG | |
| | | CCCATCGACGACCCATGCCAAAAGCCCACCCACGACCTTCCCGAC | |
| | | CCCGATAGACACCCCCCAAGAATACAAATCTCGGACCCGGCAAGA | |
| | | CTCGGACCGGAGACGCTCTTCCACTCATGGGACATCAGACGTGGA | |
| | | TACATTAACACAAAAGCTATTAAAAGAATCTCAGATTACACAGAATC | |
| | | TAATGACTATTTTTCAACAGGCGTCGTGTCAAAAAGACCCCGATTG | |
| | | GAAACCCAGTACCACGGCCAACACGAAAGCCAAGAAGAAGACGC | |
| | | CTATCTTTTACTCAAACAACTCCAGGAAGAGCAAGAAACGAGCAGT | |
| | | TCGGAGGGAGAACAAGCACCCCAAGAAAAAACACTCCAAAAAGAA | |
| | | AAGCTCCTCAAGCAGCTGCAGCTCCACAAGCAGCAGCAGCAACTC | |
| | | CTCAGAAAAGGAATCAGACACCTCCTCGGGGACGTCCTCCGACTC | |
| | | AGACGGGGAGTCCACTGGGACCCAGGCCTATAG | |
| BAB79342.1 | AB064603.1 | ACGGCGTGGTGGTGGGGCCGATGGAGACAGCGCCGCTGGGGCC | 194 |
| | | GCCGCCGCCGCAGACCATGGAGGGTACGACGAAGGAGACCTAGA | |
| | | AGATCTTTTCGCCGCCGCCGCCGAGGACGATATGTGAGTAGGCG | |
| | | GAGGCGCCGCCGCTACTACAGGCGCAGACTAAGACGGGGCAGAC | |
| | | GCAGAGGGCGACGAAAGAGACACAGACCGACCCTAATACTGAGG | |
| | | CAGTGGCAACCTGACGTTGTTAAACACTGTAAGATAACAGGATGG | |
| | | ATGCCCCTCATTATCTGTGGCTCTGGCAGCACACAGATGAACTTTA | |
| | | TAACCCACATGGACGATACTCCTCCCATGGGATACACCTACGGGG | |
| | | GCAACTTTGTAAATGTGACTTTCAGCTTAGAGGCCATCTATGAACA | |
| | | GTTCCTATATCACAGAAACAGATGGTCCAGATCTAACCATGACTTA | |
| | | GACCTAGCCAGGTACCAAGGAACCACCTTAAAACTCTACAGACAC | |
| | | GCCACAGTAGACTACATACTTTCCTACAACAGGACAGGACCCTTCC | |
| | | AGATCAGTGAGATGACATACATGAGCACTCACCCAGCAATAATGCT | |
| | | ACTAATGAAACACAGAATAGTTGTGCCCAGCCTTAGAACAAAGCCT | |
| | | AAAGGCAGGCGCTCCATAAAAATTAGAATAAAGCCCCCCAAACTTA | |
| | | TGCTAAACAAGTGGTACTTTACCAAAGACATATGCTCCATGGGCCT | |
| | | CTTCCAACTAATGGCCACCGGAGCAGAACTCACTAACCCCTGGCT | |
| | | CAGAGACACCACAAAAAGCCCAGTAATAGGCTTCAGAGTTCTAAAA | |
| | | AACAGTGTTTACACCAACTTATCTAACCTAAAAGACGTATCCATATC | |
| | | AGGAGAAAGAAAATCCATCTTAAACAAAATTCACCCAGAAACTCTC | |
| | | ACAGGATCAGGCAATGCATCTAAAGGGTGGGAATACTCATACACA | |
| | | AAACTAATGGCGCCCATATACTATTCAGCAGTTAGAAACAGCACAT | |
| | | ACAACTGGCAAAACTACCAAACACACTGCGCAACAACAGCTATCAA | |
| | | ATTTAAAGAAAAACAAACCAGTACTCTAACTCTTATTAAAGCAGAGT | |
| | | ACTTATACCACTACCCAAACAATGTCACACAGGTAGACTTCATAGA | |
| | | TGACCCCACACTCACACATGACTTTGGCATATACAGCCCATACTGG | |
| | | ATAACACCTACCAGAATAAGCCTAGACTGGGACACACCATGGACA | |
| | | TATGTCAGATACAACCCACTCTCAGACAAAGGCATAGGCAACAGAA | |
| | | TCTATGCACAGTGGTGCTCAGAAAAAAGCAGCAAATTAGACACCAC | |
| | | AAAGAGCAAATGCATACTAAAAGACTTTCCACTATGGTGCATGGCC | |
| | | TATGGCTACTGTGACTGGGTAGTAAAATGTACAGGAGTGTCCAGT | |
| | | GCATGGACAGACATGAGAGTAGCCATCATCTGCCCGTACACAGAA | |
| | | CCGGCACTTATAGGGTCAGATGAAAATGTAGGCTTTATTCCAGTAA | |
| | | GTGACACCTTTTGCAACGGAGACATGCCGTTTCTTGCACCATACAT | |
| | | CCCTATTACATGGTGGATCAAGTGGTACCCCATGATTACACACCAA | |
| | | AAGGAAGTTCTTGAGGCAATAGTAAACTGTGGACCGTTTGTCCCC | |
| | | CGAGACCAAAGTTCCCCAGCTTGGGAAATCACCATGGGTTACAAA | |
| | | ATGGATTGGAAATGGGGCGGCTCTCCCCTGCCTTCACAGGCAATC | |
| | | GACGACCCCTGCCAGAAGCCCACCCATGAGCTACCCGATCCCGAT | |
| | | AGACACCCTCGCATGTTACAAGTCTCTGACCCGACAAAGCTCGGA | |
| | | CCGAAGACAGTGTTCCACAAATGGGACTGGAGACGTGGGCAACTT | |
| | | AGCAAAAGAAGTATTAAAAGAGTCCAAGAAGACTCAACGGATGAT | |
| | | GAATATGTTACAGGGCCTTTATCAAGAAAAAGAAACAAGCTCGACA | |
| | | CAAAGATGCCAGGCCCCCCAACCCCCGAAAAAGAAAGCTACACTT | |
| | | TACTCCAAGCCCTCCAAGAGTCGGGCCAGGAGAGCAGCTCCCAG | |
| | | GACGAAGAACAAGCACCCCAAAAAGAAGAGAACCAGAAAGAAGCG | |
| | | CTCGTGGAGCAGCTCCAGCTCCAGAAACAGCACCAGCGAGTCCTC | |
| | | AAGCGAGGCCTCAAACTCCTCTTGGGAGACGTCCTCCGACTCCGC | |
| | | CGCGGAGTCCACTGGGACCCCCTCCTATCCTAA | |
| BAB79346.1 | AB064604.1 | ATGGCATGGGGATGGTGGAAACGAAAGCGGCGCTGGTGGTGGAG | 195 |
| | | AAAGCGGTGGACCCGTGGCCGACTTCGCAGACGATGGCCTAGAC | |
| | | GATCTCGTCGCCGCCCTCGACGAAGAAGAGTAAGGAGGCGGAGG | |
| | | AGGTGGAGGAGAGGGCGACCGAGACGCAGACTGTACAGACGCG | |
| | | GGAGACGGTACAGACGAAAACGGAAGAGGGCTAAGATAACTATAA | |
| | | GACAATGGCAGCCAGCCATGACGAGACGCTGTTTTATAAGGGGAC | |
| | | ACATGCCCGCTTTAATATGTGGCTGGGGGGCGTACGCCAGCAACT | |
| | | ACACCAGCCACCTGGAGGACAAAATAGTTAAAGGACCCTACGGAG | |
| | | GGGGACACGCCACTTTTAGATTCTCCCTACAAGTACTGTGCGAGG | |
| | | AGCATCTAAAACACCACAATTACTGGACTAGAAGTAACCAAGACCT | |
| | | AGAACTAGCTCTGTACTACGGAGCCACTATTAAATTTTACAGAAGC | |
| | | CCAGACACAGACTTTATAGTAACATACCAGAGAAAATCCCCCCTTG | |
| | | GAGGCAACATACTAACAGCTCCTTCACTACACCCAGCAGAGGCCA | |
| | | TGCTAAGCAAAAACAAAATACTAATACCGAGCTTACAAACAAAACC | |
| | | CAAAGGAAAAAAGACTGTAAAAGTTAACATACCACCCCCCACCCTT | |
| | | TTTGTACATAAGTGGTACTTTCAGAAGGACATATGTGACCTAACAC | |
| | | TGTTTAACTTGAACGTTGTTGCGGCTGACTTGCGGTTTCCGTTCTG | |
| | | CTCACCACAAACTGACAACGTTTGCATCACCTTCCAGGTACTAGCC | |
| | | GCAGAGTACAACAACTTCCTCTCTACAACTTTAGGCACTACAAATG | |
| | | AATCCACTTTTATAGAAAACTTTTTAAAAGTTGCATTTCCAGATGAC | |
| | | AAACCTAGGCATTCAAACATTTTAAACACATTTAGAACAGAAGGAT | |
| | | GCATGTCTCACCCCCAACTACAAAAATTTAAACCACCAAACACAGG | |
| | | ACCAGGCGAAAACAAATACTTTTTTACACCAGACGGACTATGGGGA | |
| | | GACCCCATATACATATACAATAACGGAGTACAACAACAAACTGCAC | |
| | | AACAAATTAGAGAAAAAATTAAAAAAAACATGGAAAATTACTATGCC | |
| | | AAAATAGTAGAAGAAAACACAATAATAACAAAAGGATCAAAAGCAC | |
| | | ACTGCCATCTAACAGGCATATTTTCACCACCATTCTTAAACATAGGT | |
| | | AGAGTAGCCAGAGAATTTCCAGGACTATACACAGACGTTGTCTATA | |
| | | ATCCATGGACAGATAAAGGCAAAGGAAACAAAATATGGTTAGACA | |
| | | GCCTAACAAAAAGCGACAATATATATGACCCAAGACAAAGCATTCT | |
| | | ACTAATGGCAGACATGCCACTATACATAATGTTAAATGGATATATA | |
| | | GACTGGGCAAAAAAAGAAAGAAACAACTGGGGCTTAGCTACACAA | |
| | | TACAGACTACTACTAACATGTCCCTACACATTCCCAAGACTATACG | |
| | | TAGAAACAAACCCAAACTATGGATATGTACCATATTCAGAATCATTT | |
| | | GGAGCAGGCCAAATGCCAGACAAAAACCCCTACGTACCAATTACA | |
| | | TGGAGAGGCAAATGGTACCCTCACATACTTCATCAAGAGGCAGTT | |
| | | ATAAATGACATAGTAATATCAGGCCCATTCACACCAAAAGACACAA | |
| | | AACCAGTAATGCAATTAAACATGAAATACTCGTTTAGATTCACATGG | |
| | | GGCGGCAATCCTATTTCCACACAGATTGTTAAAGACCCCTGCACC | |
| | | CAGCCCACCTTTGAAATACCCGGTGGCGGTAACATCCCTCGCAGA | |
| | | ATACAAGTCATCAATCCGAAAGTCCTCGGACCCAGCTACAGTTTCA | |
| | | GATCCTTTGACCTCAGACGTGACATGTTTAGCGGCTCGAGTCTTAA | |
| | | AAGAGTCTCAGAACAACAAGAGACTTCTGAGTTTTTATTCTCCGGC | |
| | | GGCAAACGCCCCAGGATCGACCTTCCCAAGTACGTCCCGCCAGAA | |
| | | GAAGACTTCAATATCCAAGAGAGACAACAAAGAGAACAGAGACCG | |
| | | TGGACGAGCGAAAGCGAGAGCGAAGCAGAAGCCCAAGAAGAGAC | |
| | | GCAGGCGGGCTCGGTCCGAGAGCAGCTCCAGCAGCAGCTCCAAG | |
| | | AGCAGTTTCAACTCCGAAGAGGGCTCAAGTGCCTCTTCGAGCAGT | |
| | | TAGTCAGAACCCAACAGGGAGTCCACGTAGATCCCTGCCTCGTGT | |
| | | AG | |
| BAB79354.1 | AB064606.1 | ATGGCATGGGGATGGTGGAAGCGACGGCGGCGCTGGTGGTTCCG | 196 |
| | | GAAGCGGTGGACCCGTGGCAGACTTCGCAGACGATGGCCTCGAT | |
| | | CAGCTCGTCGCCGCCCTAGACGACGAAGAGTAAGGAGACGCAGA | |
| | | CGATGGAGGAGGGGGCGACCTAGACGCAGACTGTACCGACGCTA | |
| | | CAGACGCAAAAAACGTAGGAGACGAAAGCCCAAAACAGTTTTAAA | |
| | | ACAATGGCAGCCAGACATTACAAAGAGGTGCTACATAATAGGCTA | |
| | | CATTCCTGCCATAATATGCGGGGCGGGCACCTGGTCTCACAACTA | |
| | | CACCAGCCACCTGCTAGATATTATCCCCAAGGGACCGTTTGGAGG | |
| | | GGGACACAGCACCATGAGATTCTCCCTAAAAGTGCTCTTCGAAGA | |
| | | GCACCTGAGACACCTAAACTTTTGGACACGTAGTAACCAGGATTTA | |
| | | GAACTTGTAAGATACTTTAGATGCTCCTTTAGGTTCTACAGAGACC | |
| | | AACACACAGACTATCTTGTACACTACAGCAGAAAAACACCCCTGGG | |
| | | AGGCAACAGACTGACAGCACCTAGCCTTCACCCAGGGGTACAGAT | |
| | | GCTAAGCAAAAACAAAATAATAGTACCCAGCTATGATACTAAACCT | |
| | | AAGGGCAAAAGCTATGTAAAAGTAACTATAGCACCCCCCACTCTAC | |
| | | TAACTGACAAGTGGTACTTTAGCAAAGACATTTGTGACACAACCTT | |
| | | GGTTAACTTAGACGTTGTACTCTGCAACTTGCGGTTTCCGTTCTGC | |
| | | TCACCACAAACTGACAACCCTTGCATCACGTTTTCCGTTCTTCACT | |
| | | CCATCTACAACGACTTCCTCTCTATAGTAGATACTGGAAACTATAAA | |
| | | ACACAATTTGTGTCAAACTTATCTACAAAAGTAGGTACTGACTGGG | |
| | | GAAAAAGACTAAACACATTTAGAACAGAAGGCTGCTACTCTCACCC | |
| | | TAAATTACCCAAAAAGGCAGTAACACCTGGAAATGACAAAACATAC | |
| | | TTTACTGTACCCGATGGCTTATGGGGAGACGCTGTATTTAATGCAG | |
| | | AGGCAAGCAATATAATTACTAAAAACATGGAGTCATACAGCGAGTC | |
| | | TGCAAAAGCCAGAGGAGTGCAAGGAGACCCTGCATTTTGCCACCT | |
| | | TACAGGCATATACTCACCTCCCTGGCTAACACCAGGTAGAATATCC | |
| | | CCGGAGACTCCAGGACTTTACACAGACGTGACTTACAACCCATAC | |
| | | GCAGACAAAGGAGTGGGTAACAGAATATGGGTTGACTACTGCAGT | |
| | | AAAAAAGGCAATAAATATGACAATACAAGTAAATGCCTTTTAGAAG | |
| | | ACATGCCACTATGGATGGTCACCTTTGGCTATGTAGACTGGGTAAA | |
| | | AAAAGAAACTGGCAACTGGGGTATTCCACTGTGGGCCAGAGTACT | |
| | | GATAAGATGCCCTTACACAGTACCAAAACTTTACAATGAAGCAGAC | |
| | | CCAAACTACGGATGGGTCCCTTACTCCTACTACTTTGGAGAAGGAA | |
| | | AAATGCCAAACGGAGACCTGTACGTACCCTTTAAAATTAGAATGAA | |
| | | GTGGTACCCGTCCATGTGGAACCAAGAACCAGTACTAAATGACTTA | |
| | | GCAAAGAGCGGACCGTTTGCATACAAAGACACAAAAACCAGTGTG | |
| | | ACTGTGACTGCTAAATACAAATTTACATTTAACTTCGGGGGCAACC | |
| | | CCGTACCCTCACAGATTGTACAAGATCCCTGCACACAGTCCACCTA | |
| | | TGACATCCCCGGCACCGGTAACTTGCCTCGCAGAATACAAGTCAT | |
| | | TGACCCGAAAGTCCTCGGTCCCCACTACTCATTCCACCGCTGGGA | |
| | | CTTCAGGCGTGGCCTCTTTGGCCAACAAGCTATTAAGAGAGTGTC | |
| | | AGAACAACCAACAACTTCTGAGTTTTTATTCTCAGGTCCAAAGAGA | |
| | | CCCAGAATCGATCAAGGGCCTTACATCCCGCCAGAAAAAGGCTCA | |
| | | GATTCACTCCAAAGAGAATCGAGACCGTGGAGCAACTCGGAGACC | |
| | | GAGGCAGAGACAGAAGCCCCCTCGGAAGAAGAGCCGGAGAACCA | |
| | | AGAAGAACAAGTACTCCAGTTGCAGCTCCGACAGCAGCTCCGAGA | |
| | | ACAGCGAAAACTCAGACAGGGAATCCAGTGCCTCTTCGAGCAACT | |
| | | GATAACAACCCAACAGGGGGTTCACAAAAACCCATTGCTAGAGTAG | |
| ABD34286.1 | DQ186994.1 | ATGGCGTGGTCGTGGTGGTGGAGGCGACGGAAACGCTGGTGGCC | 197 |
| | | GCGCAGAAGGAGGCGATGGAGGAGATTTCGCACCCGAAGAGCTA | |
| | | GACGAGCTGTTCCGCGCCGTCGCCGCCGACGAAGAGTAAGGAGG | |
| | | CGCCGGTGGGGGAGGCGAAGACGTAGGAGACGGGTTTTTTATAA | |
| | | GAGACGCAGACGAAAGACTGGCAGACTGTACAGAAAGCCCAAAAA | |
| | | GAAACTAGTACTGACTCAGTGGCACCCCACTACCGTCCGCAACTG | |
| | | CTCCATCCGAGGCCTTGTGCCTCTAGTACTCTGCGGACACACTCA | |
| | | GGGCGGCAGAAACTTTGCTCTCAGGAGCGATGACTACCCCAAGCA | |
| | | GGGGTCTCCTTACGGAGGCAGTTTTAGCACTACAACCTGGAACTT | |
| | | GAGGGTCCTTTTTGACGAACACCAAAAACACCACAACACGTGGAG | |
| | | CTACCCCAATAACCAGCTAGACCTGGGCAGATACAAGGGCTGCAC | |
| | | CTTCTACTTTTACAGAGACAAAAAGACAGACTACATAGTAAAGTTTC | |
| | | AGAGGAGGGGACCCTTTAAAATAAACAAGTACAGCAGTCCCATGG | |
| | | CCCATCCGGGCATGATGATGCTAGATAAGATGAAAATCCTGGTGC | |
| | | CCAGCTTTGATACCAGGCCCGGGGGTCGCAGAAGAGTAAAAGTAA | |
| | | CTATCCGCCCCCCCACTCTGTTAGAGGACAAGTGGTACACCCAGC | |
| | | AAGACCTGGCGCCCGTTAATCTTGTGTCACTTGTGGTTTCTGCGG | |
| | | CTAGCTTCATACATCCGTTTAGCCAACCACAAACGAACAACATTTG | |
| | | CACAACCTTCCAGGTGTTGAAAGACATGTACTATGACTGCATAGGA | |
| | | ATTAATTCCACTTTAACAACCAAGTATGAAAACTTATTTAATAAACTA | |
| | | TATTCCAAATGCTGCTACTTTGAAACCTTTCAAACAATAGCCCAGCT | |
| | | AAATCCTGGCTTTAAAGCTGCTAAAAAGACTACTAATGGTTCTGGT | |
| | | TCTACAGCTGCAACACTAGGAGACGCAGTAACTGAACTTAAAAACC | |
| | | CAAATGGTACTTTTTACACAGGCAACAATAGCACCTTTGGCTGCTG | |
| | | CACATATAAACCCACTAAAGAAATAGGTAGTAATGCCAATAAGTGG | |
| | | TTCTGGCATCAGTTAACAGCCACAGATTCAGACACACTAGGCCAAT | |
| | | ACGGCCGTGCCTCCATTAAGTATATGGAGTACCACACAGGCATTTA | |
| | | CAGCTCAATTTTTCTTAGCCCACTAAGAAGCAATCTAGAATTCCCTA | |
| | | CAGCATACCAAGATGTAACATATAATCCACTAACTGACAGAGGTAT | |
| | | AGGTAACAGAATCTGGTACCAGTACAGTACCAAAGAAAACACTACA | |
| | | TTTAATGAAACACAGTGCAAATGTGTACTATCAGACTTGCCACTGT | |
| | | GGAGCATGTTTTATGGCTATGTAGATTTTATAGAGTCAGAACTAGG | |
| | | CATCTCAGCAGAGATACACAACTTTGGCATAGTATGTGTCCAGTGC | |
| | | CCCTACACGTTTCCCCCAATGTTTGACAAATCCAAACCAGATAAAG | |
| | | GCTACGTGTTCTATGACACCCTTTTTGGCAACGGAAAGATGCCAGA | |
| | | CGGGAGCGGACACGTACCCACCTACTGGCAGCAGAGGTGGTGGC | |
| | | CCAGATTCAGCTTCCAGAGACAAGTGATGCACGACATTATCCTCAC | |
| | | CGGGCCCTTCAGCTACAAAGATGACTCTGTAATGACTGGCATAAC | |
| | | CGCAGGCTACAAGTTTAAATTCTCATGGGGCGGTGATATGGTCTC | |
| | | CGAACAGGTCATTAAAAACCCAGAGAGAGGGGACGGACGAGACT | |
| | | CCACCTATCCCGATAGACAGCGCCGCGACTTACAAGTTGTTGACC | |
| | | CACGCTCCATGGGCCCCCAATGGGTATTCCACACCTTTGACTACA | |
| | | GACGGGGGCTTTTTGGAAAGGACGCTATTAAGCGAGTGTCAGAAA | |
| | | AACCGACAGATCCTGACTACTTTACAACACCTTACAAAAAACCAAG | |
| | | ATTTTTCCCTCCAACAGCAGGAGAAGAAAAACTGCAAGAAGAAGA | |
| | | CTCCGCTTTACAGGAGAAAAGAAGCCCGCTCTCGTCAGAAGAGGG | |
| | | GCAGACGAGGGCGCAAGTCCTCCAGCAGCAGGTCCTCCAGTCGG | |
| | | AGCTCCAGCAGCAGCAGGAGCTCGGGGAGCAGCTCAGATTCCTC | |
| | | CTCAGGGAAATGTTCAAAACCCAAGCGGGCATACACATGAACCCC | |
| | | CGCGCATTTCAGGAGCTGTAA | |
| ABD34288.1 | DQ186995.1 | ATGGCGTGGTCGTGGTGGTGGAGGCGACGGAAACGCTGGTGGCC | 198 |
| | | GCGCAGAAGGAGGCGATGGAGGAGATTTCGCACCCGAAGAGCTA | |
| | | GACGAGCTGTTCCGCGCCGTCGCCGCCGACGAAGAGTAAGGAGG | |
| | | CGCCGGTGGGGGAGGCGAAGACGTAGGAGACGGGTTTTTTATAA | |
| | | GAGACGCAGACGAAAGACTGGCAGACTGTACAGAAAGCCCAAAAA | |
| | | GAAACTAGTACTGACTCAGTGGCACCCCACTACCGTCCGCAACTG | |
| | | CTCCATCCGAGGCCTTGTGCCTCTAGTACTCTGCGGACACACTCA | |
| | | GGGCGGCAGAAACTTTGCTCTCAGGAGCGATGACTACCCCAAGCA | |
| | | GGGGTCTCCTTACGGAGGCAGTTTTAGCACTACAACCTGGAACTT | |
| | | GAGGGTCCTTTTTGACGAACACCAAAAACACCACAACACGTGGAG | |
| | | CTACCCCAATAACCAGCTAGACCTGGGCAGATACAAGGGCTGCAC | |
| | | CTTCTACTTTTACAGAGACAAAAAGACAGACTACATAGTAAAGTTTC | |
| | | AGAGGAGGGGACCCTTTAAAATAAACAAGTACAGCAGTCCCATGG | |
| | | CCCATCCGGGCATGATGATGCTAGATAAGATGAAAATCCTGGTGC | |
| | | CCAGCTTTGATACCAGGCCCGGGGGTCGCAGAAGAGTAAAAGTAA | |
| | | CTATCCGCCCCCCCACTCTGTTAGAGGACAAGTGGTACACCCAGC | |
| | | AAGACCTGGCGCCCGTTAATCTTGTGTCACTTGTGGTTTCTGCGG | |
| | | CTAGCTTCATACATCCGTTTAGCCAACCACAAACGAACAACATTTG | |
| | | CACAACCTTCCAGGTGTTGAAAGACATGTACTATGACTGCATAGGA | |
| | | ATTAATTCCACTTTAACAACCAAGTATGAAAACTTATTTAATAAACTA | |
| | | TATTCCAAATGCTGCTACTTTGAAACCTTTCAAACAATAGCCCAGCT | |
| | | AAATCCTGGCTTTAAAGCTGCTAAAAAGACTACTAATGGTTCTGGT | |
| | | TCTACAGCTGCAACACTAGGAGACGCAGTAACTGAACTTAAAAACC | |
| | | CAAATGGTACTTTTTACACAGGCAACAATAGCACCTTTGGCTGCTG | |
| | | CACATATAAACCCACTAAAGAAATAGGTAGTAATGCCAATAAGTGG | |
| | | TTCTGGCATCAGTTAACAGCCACAGATTCAGACACACTAGGCCAAT | |
| | | ACGGCCGTGCCTCCATTAAGTATATGGAGTACCACACAGGCATTTA | |
| | | CAGCTCAATTTTTCTTAGCCCACTAAGAAGCAATCTAGAATTCCCTA | |
| | | CAGCATACCAAGATGTAACATATAATCCACTAACTGACAGAGGTAT | |
| | | AGGTAACAGAATCTGGTACCAGTACAGTACCAAAGAAAACACTACA | |
| | | TTTAATGAAACACAGTGCAAATGTGTACTATCAGACTTGCCACTGT | |
| | | GGAGCATGTTTTATGGCTATGTAGATTTTATAGAGTCAGAACTAGG | |
| | | CATCTCAGCAGAGATACACAACTTTGGCATAGTATGTGTCCAGTGC | |
| | | CCCTACACGTTTCCCCCAATGTTTGACAAATCCAAACCAGATAAAG | |
| | | GCTACGTGTTCTATGACACCCTTTTTGGCAACGGAAAGATGCCAGA | |
| | | CGGGAGCGGACACGTACCCACCTACTGGCAGCAGAGGTGGTGGC | |
| | | CCAGATTCAGCTTCCAGAGACAAGTGATGCACGACATTATCCTCAC | |
| | | CGGGCCCTTCAGCTACAAAGATGACTCTGTAATGACTGGCATAAC | |
| | | CGCAGGCTACAAGTTTAAATTCTCATGGGGCGGTGATATGGTCTC | |
| | | CGAACAGGTCATTAAAAACCCAGAGAGAGGGGACGGACGAGACT | |
| | | CCACCTATCCCGATAGACAGCGCCGCGACTTACAAGTTGTTGACC | |
| | | CACGCTCCATGGGCCCCCAATGGGTATTCCACACCTTTGACTACA | |
| | | GACGGGGGCTTTTTGGAAAGGACGCTATTAAGCGAGTGTCAGAAA | |
| | | AACCGACAGATCCTGACTACTTTACAACACCTTACAAAAAACCAAG | |
| | | ATTTTTCCCTCCAACAGCAGGAGAAGAAAAACTGCAAGAAGAAGA | |
| | | CTCCGCTTTACAGGAGAAAAGAAGCCCGCTCTCGTCAGAAGAGGG | |
| | | GCAGACGAGGGCGCAAGTCCTCCAGCAGCAGGTCCTCCAGTCGG | |
| | | AGCTCCAGCAGCAGCAGGAGCTCGGGGAGCAGCTCAGATTCCTC | |
| | | CTCAGGGAAATGTTCAAAACCCAAGCGGGCATACACATGAACCCC | |
| | | CGCGCATTTCAGGAGCTGTAA | |
| ABD34290.1 | DQ186996.1 | ATGGCATGGGGATGGTGGAGATGGCGGCGCCGCTGGCCCGCCA | 199 |
| | | GACGCTGGAGGAGACGCCGTCGCCGGCGCCCCGTACGGAGAAC | |
| | | AAGAGCTCGCCGACCTGCTCGACGCTATAGAAGACGACGAACAGT | |
| | | AAGAACCAGGCGGAGGCGGTGGGGGCGCAGACGGTACAGACGG | |
| | | GGCTGGAGACGCAGGACTTATGTGAGGAAGGGGCGACACAGAAA | |
| | | AAAGAAAAAGAGACTCATACTGAGACAGTGGCAGCCCGCCACCAG | |
| | | ACGCAGATGCACCATAACAGGGTACCTGCCCATAGTGTTCTGCGG | |
| | | CCACACTAAGGGCAATAAAAACTACGCCCTACACTCTGACGACTAC | |
| | | ACCCCCCAAGGACAGCCATTTGGAGGGGCTCTAAGCACTACCTCA | |
| | | TTCTCTTTAAAAGTACTGTTTGACCAGCATCAGAGAGGACTGAATA | |
| | | AGTGGTCGTTCCCCAACGACCAACTAGACCTGGCCAGATACAGGG | |
| | | GCTGCAAATTCTACTTTTACAGGACAAAACAGACTGACTGGATAGG | |
| | | CCAGTATGATATATCAGAGCCCTACAAGCTAGACAAGTACAGCTGC | |
| | | CCCAACTACCACCCGGGAAACATGATTAAAGCAAAGCACAAATTTT | |
| | | TAATTCCCAGCTATGACACTAATCCCAGGGGCAGACAAAAAATTAT | |
| | | AGTTAAAATTCCCCCCCCAGACCTCTTTGTAGACAAGTGGTACACT | |
| | | CAGGAAGACCTGTGTTCCGTTAATCTTGTGTCACTTGCGGTTTCTG | |
| | | CGGCTTCCTTTCTCCACCCATTCGGCTCACCACAAACTGACAACCC | |
| | | TTGCTACACCTTCCAGGTGTTGAAAGAGTTCTACTACCAGGCAATA | |
| | | GGCTTCTCAGCAACAGATCAACAAAGAGAAAAAGTTTTTGATATAT | |
| | | TATACAAAAACAACTCATACTGGGAATCAAACATAACTCCCTTTTAT | |
| | | GTAATTAATGTTAAAAAAGGGTCTAACACAACACAGTACATGTCAC | |
| | | CTCAAATTTCAGACTCATCTTTTAGAAAGAAAGTAAATACTAACTAC | |
| | | AACTGGTATACCTACGATGCCAAAACTAATGCATCACAATTAAAGC | |
| | | AACTAAGAAATGCATACTTTAAACAATTAACCTCTGAAGGCCCACA | |
| | | ACACACATACTCTGACAATGGCTACGCCAGTCAGTGGACCACCCC | |
| | | CAGCACAGACGCCTACGAATACCACTTAGGCATGTTTAGTACTATA | |
| | | TTTTTAGCCCCAGACAGACCAGTACCTCGCTTTCCCTGCGCTTACC | |
| | | AAGATGTTACTTACAACCCACTAATGGACAAAGGAGTGGGCAACC | |
| | | ATGTATGGTTTCAATACAACACAAAGGCAGACACACAGCTAATAGT | |
| | | TACAGGAGGGTCCTGCAAAGCACACATACAAGACATACCCCTATG | |
| | | GGCAGCCTTCTATGGATACAGTGACTTTATAGAGTCAGAGCTAGG | |
| | | CCCCTTTGTAGACGCAGACACAGTAGGCCTTATCTGTGTAATATGC | |
| | | CCTTACACTAAACCTCCCATGTACAACAAGACAAATCCCATGATGG | |
| | | GGTACGTGTTTTATGACAGAAACTTTGGTGACGGCAAATGGACTGA | |
| | | CGGACGGGGCAAAATAGAGCCCTACTGGCAAGTTAGGTGGAGGC | |
| | | CCGAAATGCTTTTCCAAGAAACTGTAATGGCAGACATAGTACAGAC | |
| | | AGGGCCCTTTAGCTACAAAGATGAACTTAAAAACAGCACACTAGTA | |
| | | TGCAAGTACAAATTCTATTTTACCTGGGGAGGTAACATGATGTTCC | |
| | | AACAGACGATCAAAAACCCGTGCAAGACGGACGGACAACCCACC | |
| | | GACTCCAGTAGACACCCTAGAGGAATACAAGTGGCGGACCCGGAA | |
| | | CAAATGGGACCCCGCTGGGTGTTCCACTCCTTTGACTGGCGAAGG | |
| | | GGCTATCTTAGCGAGAAAGCTCTCAAACGCCTGCAAGAAAAACCT | |
| | | CTTGACTATGACGAATATTTTACACAACCAAAAAGACCTAGAATCTT | |
| | | TCCTCCAACAGAATCAGCAGAGGGAGAGTTCCGAGAGCCCGAAAA | |
| | | AGGCTCGTATTCAGAGGAAGAAAGGTCGCAAGCCTCTGCCGAAGA | |
| | | GCAGACGGAGGAGGCGACAGTACTCCTCCTCAAGCGACGACTCA | |
| | | GAGAGCAACAGCAGCTCCAGCAGCAGCTCCAATTCCTCACCCGAG | |
| | | AAATGTTCAAAACGCAAGCGGGTCTCCACATAAACCCTATGTTATT | |
| | | AAACCAGCGATAA | |
| ABD34292.1 | DQ186997.1 | ATGGCATGGGGATGGTGGAGATGGCGGCGCCGCTGGCCCGCCA | 200 |
| | | GACGCTGGAGGAGACGCCGTCGCCGGCGCCCCGTACGGAGAAC | |
| | | AAGAGCTCGCCGACCTGCTCGACGCTATAGAAGACGACGAACAGT | |
| | | AAGAACCAGGCGGAGGCGGTGGGGGCGCAGACGGTACAGACGG | |
| | | GGCTGGAGACGCAGGACTTATGTAAGGAAGGGGCGACACAGAAA | |
| | | AAAGAAAAAGAGACTGATACTGAGACAGTGGCAGCCCGCCACCAG | |
| | | ACGCAGATGCACCATAACAGGGTACCTGCCCATAGTGTTCTGCGG | |
| | | CCACACTAAGGGCAATAAAAACTACGCCCTACACTCTGACGACTAC | |
| | | ACCCCCCAAGGACAGCCATTTGGAGGGGCTCTAAGCACTACCTCA | |
| | | TTCTCTTTAAAAGTACTGTTTGACCAGCATCAGAGAGGACTGAATA | |
| | | AGTGGTCGTTCCCCAACGACCAACTAGACCTGGCCAGATACAGGG | |
| | | GCTGCAAATTCTACTTTTACAGGACAAAACAGACTGACTGGATAGG | |
| | | CCAGTATGATATATCAGAGCCCTACAAGCTAGACAAGTACAGCTGC | |
| | | CCCAACTACCACCCGGGAAACATGATTAAAGCAAAGCACAAATTTT | |
| | | TAATTCCCAGCTATGACACTAATCCCAGGGGCAGACAAAAAATTAT | |
| | | AGTTAAAATTCCCCCCCCAGACCTCTTTGTAGACAAGTGGTACACT | |
| | | CAGGAAGACCTCTGTTCCGTTAATCTTGTGTCACTTGCGGTTTCTG | |
| | | CGGCTTCCTTTCTCCACCCATTCGGCTCACCACAAACTGACAACCC | |
| | | TTGCTACACCTTCCAGGTGTTGAAAGAGTTCTACTACCAGGCAATA | |
| | | GGCTTCTCAGCAACAGATGAACAAAGAGAAAAAGTTTTTGATATAT | |
| | | TATACAAAAACAACTCATACTGGGAATCAAACATAACTCCCTTTTAT | |
| | | GTAATTAATGTTAAAAAAGGGTGTAACACAACACAGTACATGTCAC | |
| | | CTCAAATTTCAGACTCATCTTTTAGAAAGAAAGTAAATACTAACTAC | |
| | | AACTGGTATACCTACGATGCCAAAACTAATGCATCACAATTAAAGC | |
| | | AACTAAGAAATGCATACTTTAAACAATTAACCTCTGAAGGCCCACA | |
| | | ACACACATACTCTGACAATGGCTACGCCAGTCAGTGGACCACCCC | |
| | | CAGCACAGACGCCTACGAATACCACTTAGGCATGTTTAGTACTATA | |
| | | TTTTTAGCCCCAGACAGACCAGTACCTCGCTTTCCCTGCGCTTACC | |
| | | AAGATGTTACTTACAACCCACTAATGGACAAAGGAGTGGGCAACC | |
| | | ATGTATGGTTTCAGTACAACACAAAGGCAGACACACAGCTAATAGT | |
| | | TACAGGAGGGTCCTGCAAAGCACACATACAAGACATACCCCTATG | |
| | | GGCAGCCTTCTATGGATACAGTGACTTTATAGAGTCAGAGCTAGG | |
| | | CCCCTTTGTAGACGCAGACACAGTAGGCCTTATCTGTGTAATATGC | |
| | | CCTTACACTAAACCCCCCATGTACAACAAGACAAATCCCATGATGG | |
| | | GGTACGTGTTTTATGACAGAAACTTTGGTGACGGCAAATGGACTGA | |
| | | CGGACGGGGCAAAATAGAGCCCTACTGGCAAGTTAGGTGGAGGC | |
| | | CCGAAATGCTTTTCCAAGAAACTGTAATGGCAGACATAGTACAGAC | |
| | | AGGGCCCTTTAGCTACAAAGATGAACTTAAAAACAGCACACTAGTA | |
| | | TGCAAGTACAAATTCTATTTTACCTGGGGAGGTAACATGATGTTCC | |
| | | AACAGACGATCAAAAACCCGTGCAAGACGGACGGACAACCCACC | |
| | | GACTCCAGTAGACACCCTAGAGGAATACAAGTGGCGGACCCGGAA | |
| | | CAAATGGGACCCCGCTGGGTGTTCCACTCCTTTGACTGGCGAAGG | |
| | | GGCTATCTTAGCGAGAAAGCTCTCAAACGCCTGCAAGAAAAACCT | |
| | | CTTGACTATGACCAATATTTTACACAACCAAAAAGACCTAGAATCTT | |
| | | TCCTCCAACAGAATCAGCAGAGGGAGAGTTCCGAGAGCCCGAAAA | |
| | | AGGCTCGTATTCAGAGGAAGAAAGGTTGCAAGCCTCTGCCGAAGA | |
| | | GCAGACGGAGGAGGCGACAGTACTCCTCCTCAAGCGACGACTCA | |
| | | GAGAGCAACAGCAGCTCCAGCAGCAGCTCCAATTCCTCACCCGAG | |
| | | AAATGTTCAAAACGCAAGCGGGTCTCCACATAAACCCTATGTTATT | |
| | | AAACCAGCGATAA | |
| ABD34294.1 | DQ186998.1 | ATGGCATGGGGATGGTGGAGATGGCGGCGCCGCTGGCCCGCCA | 201 |
| | | GACGCTGGAGGAGACGCCGTCGCCGGCGCCCCGTACGGAGAAC | |
| | | AAGAGCTCGCCGACCTGCTCGACGCTATAGAAGACGACGAACAGT | |
| | | AAGAACCAGGCGGAGGCGGTGGGGGCGCAGACGGTACAGACGG | |
| | | GGCTGGAGACGCAGGACTTATGTAAGGAAGGGGCGACACAGAAA | |
| | | AAAGAAAAAGAGACTGATACTGAGACAGTGGCAGCCCGCCACCAG | |
| | | ACGCAGATGCACCATAACAGGGTACCTGCCCATAGTGTTCTGCGG | |
| | | CCACACTAAGGGCAATAAAAACTACGCCCTACACTCTGACGACTAC | |
| | | ACCCCCCAAGGACAGCCATTTGGAGGGGCTCTAAGCACTACCTCA | |
| | | TTCTCTTTAAAAGTACTGTTTGACCAGCATCAGAGAGGACTGAATA | |
| | | AGTGGTCGTTCCCCAACGACCAACTAGACCTGGCCAGATACAGGG | |
| | | GCTGCAAATTCTACTTTTACAGGACAAAACAGACTGACTGGATAGG | |
| | | CCAGTATGATATATCAGAGCCCTACAAGCTAGACAAGTACAGCTGC | |
| | | CCCAACTACCACCCGGGAAACATGATTAAAGCAAAGCACAAATTTT | |
| | | TAATTCCCAGCTATGACACTAATCCCAGGGGCAGACAAAAAATTAT | |
| | | AGTTAAAATTCCCCCCCCAGACCTCTTTGTAGACAAGTGGTACACT | |
| | | CAGGAAGACCTGTGTTCCGTTAATCTTGTGTCACTTGCGGTTTCTG | |
| | | CGGCTTCCTTTCTCCACCCATTCGGCTCACCACAAACTGACAACCC | |
| | | TTGCTACACCTTCCAGGTGTTGAAAGAGTTCTACTACCAGGCAATA | |
| | | GGCTTCTCAGCAACAGATGAACAAAGAGAAAAAGTTTTTGATATAT | |
| | | TATACAAAAACAACTCATACTGGGAATCAAACATAACTCCCTTTTAT | |
| | | GTAATTAATGTTAAAAAAGGGTGTAACACAACACAGTGCATGTCAC | |
| | | CTCAAATTTCAGACTCATCTTTTAGAAAGAAAGTAAATACTAACTAC | |
| | | AACTGGTATACCTACGATGCCAAAACTAATGCATCACAATTAAAGC | |
| | | AACTAAGAAATGCATACTTTAAACAATTAACCTCTGAAGGCCCACA | |
| | | ACACACATACTCTGACAATGGCTACGCCAGTCAGTGGACCACCCC | |
| | | CAGCACAGACGCCTACGAATACCACTTAGGCATGTTTAGTACTATA | |
| | | TTTTTAGCCCCAGACAGACCAGTACCTCGCTTTCCCTGCGCGTAC | |
| | | CAAGATGTTACTTACAACCCACTAATGGACAAAGGAGTGGGCAAC | |
| | | CATGTATGGTTTCAGTACAACACAAAGGCAGACACACAGCTAATAG | |
| | | TTACAGGAGGGTCCTGCAAAGCACACATACAAGACATACCCCTAT | |
| | | GGGCAGCCTTCTATGGATACAGTGACTTTATAGAGTCAGAGCTAG | |
| | | GCCCCTTTGTAGACGCAGACACAGTAGGCCTTATCTGTGTAATATG | |
| | | CCCTTACACTAAACCCCCCATGTACAACAAGACAAATCCCATGATG | |
| | | GGGTACGTGTTTTATGACAGAAACTTTGGTGACGGCAAATGGACT | |
| | | GACGGACGGGGCAAAATAGAGCCCTACTGGCAAGTTAGGTGGAG | |
| | | GCCCGAAATGCTTTTCCAAGAAACTGTAATGGCAGACATAGTACAG | |
| | | ACAGGGCCCTTTAGCTACAAAGATGAACTTAAAAACAGCACACTAG | |
| | | TATGCAAGTACAAATTCTATTTTACCTGGGGAGGTAACATGATGTT | |
| | | CCAACAGACGATCAAAAACCCGTGCAAGACGGACGGACAACCCAC | |
| | | CGACTCCAGTAGACACCCTAGAGGAATACAAGTGGCGGACCCGG | |
| | | AGCAAATGGGACCCCGCTGGGTGTTCCACTCCTTTGACTGGCGAA | |
| | | GGGGCTATCTTAGCGAGAAAGCTCTCAAACGCCTGCAAGAAAAAC | |
| | | CTCTTGACTATGACCAATATTTTACACAACCAAAAAGACCTAGAATC | |
| | | TTTCCTCCAACAGAATCAGCAGAGGGAGAGTTCCGAGAGCCCGAA | |
| | | AAAGGCTCGTATTCAGAGGAAGAAAGGTCGCAAGCCTCTGCCGAA | |
| | | GAGCGGACGGAGGAGGCGACAGTACTCCTCCTCAAGCGACGACT | |
| | | CAGAGAGCAACAGCAGCTCCAGCAGCAGCTCCAATTCCTCACCCG | |
| | | AGAAATGTTCAAAACGCAAGCGGGTCTCCACATAAACCCTATGTTA | |
| | | TTAAACCAGCGATAA | |
| ABD34296.1 | DQ186999.1 | ATGGCATGGAGATGGTGGAAGCGACGGAGGCGCTGGTGGTTCCG | 202 |
| | | CAAGCGGTGGACCCGTGGCAGACTTCGCAGACGATGGCCTCGAC | |
| | | CAGCTCGTCGCCGACCTAGACGACGAAGAGTAAGGAGACGCAGA | |
| | | CGTTGGAGGAGGGGGCGACCCAGACGTAGACTGTACCGACGCTA | |
| | | CAGACGCAAAAAACGTAGGAGACGAAAGCCCAAAATAATCTTAAAA | |
| | | CAATGGCAGCCAGACATTGTAAAGAGGTGCTACATAGTGGGCTAC | |
| | | ATTCCTGCCATAATATGTGGGGCGGGCACCTGGTCTCACAACTAC | |
| | | ACCAGCCACCTTCTAGACATTATCCCCAAGGGACCCTTTGGAGGA | |
| | | GGGCACAGCACTATGAGGTTCTCCCTAAAAGTACTCTCTGAAGAA | |
| | | CACCTCAGACACTTAAACTTTTGGACAAAGAGTAACCAGGACCTAG | |
| | | AACTGATAAGATACTTTAGATGCTCCTTTAAATTTTATAGAGACCAA | |
| | | GACACAGACTACATAGTACACTACAGCAGAAAAACTCCCCTGGGA | |
| | | GGCAACAGACTGACAGCACCTAACCTGCACCCAGGGGTACAAATG | |
| | | CTTAGCAAAAACAAAATAATAGTACCTAGCTATGCTACAAAACCCA | |
| | | AGGGTCCTAGCTATATAAAAGTAACCATAGCACCCCCCACACTGCT | |
| | | AACTGACAAGTGGTACTTTAGCAAAGACGTTTGTGACACAACCTTG | |
| | | GTTAACTTAGACGTTGTACTCTGCAACCTGCGGTTTCCGTTCTGCT | |
| | | CACCACAAACTGACAACCCTTGCATCACATTCCAAGTTCTGCATTC | |
| | | CATCTACAACGACTTCCTCTCTATAGTAGATACTAACAACTATAAAG | |
| | | AATCTTTTGTTAGTGCATTACCAACAAAAGTATCTACTGACTGGGG | |
| | | CAAAAGACTAAACACCTTTAGAACAGAAGGATGCTATTCACACCCC | |
| | | AAATTACATAAAAAAGCTGTAACAGCTGCTACAGATACAGAATACTT | |
| | | TACAAAGCCAGATGGTCTGTGGGGAGACACTATATTTGATGTAGAA | |
| | | AATGGACAAAAAATTATAAAAAATATGGAGTCATATGCTAAGTCAG | |
| | | CCAAAGAAAGAGGGATCAATGGAGACCCTGCTTTCTGTCACTTAAC | |
| | | AGGAATATACTCACCTCCCTGGTTAACACCAGGGAGAATATCTCCA | |
| | | GAAACACCTGGACTTTACACAGACGTGACTTACAACCCTTACGCTG | |
| | | ACAAAGGAGTGGGCAACAGAATATGGGTTGACTACTGCAGTAAAA | |
| | | AAGGCAACAAATATGACAATACAAGTAAATGCCTTTTAGAAGACAT | |
| | | GCCACTATGGATGGTATGCTTTGGCTATGTAGACTGTGTAAAAAAA | |
| | | GAAACCGGCAACTGGGGCATTCCACTATGGGCTAGAGTACTTATA | |
| | | AGAAGCCCATATACTGTTCCCAAACTATATAATGAAGCAGACCCAA | |
| | | ACTATGGATGGGTACCTATTTTTTACTATTTTGGAGAAGGCAAAAT | |
| | | GCCAAACGGAGACATGTACATACCATTTAAAATAAGAATGAAATGG | |
| | | TACCCTTCAATGTGGAACCAAGAGCCAGTATTAAATGACTTAGCAA | |
| | | AGAGCGGACCGTTTGCATACAAAAACACCAAAACAAGTGTGACTG | |
| | | TGACTGCCAAATATAAATTCACATTTAACTTCGGTGGCAACCCCGT | |
| | | ACCCTCACAGATTGTACAAGATCCCTGCACACAGCCCACCTACGA | |
| | | CATCCCCGGCACCGGTAACCTGCCTCGCAGAATACAAGTCATTGA | |
| | | CCCGAAAGTCCTCAGTCCCCACTATTCCTTCCACCGGTGGGACTT | |
| | | CAGACGTGGCCTGTTTGGCTCACAAGCTATTAAGAGAGTGTCAGA | |
| | | ACAATCAACAACTTCTGAGTTTTTATTCTCAGGCCCAAAGAAACCC | |
| | | AGAATCGATCAAGGTCCTTACATCCCGCCAGAAAAAGGCTCAGGT | |
| | | TCACTCCAAAGAGAACCGAGACCGTGGAGCAGCTCGGAGACCGA | |
| | | GGCAGAGACAGAAGCCCCCTCGGAAGAAGAGCCGGAGAACCAAG | |
| | | AAGAACAAGTACTCCAGTTGCAGCTCAGACAGCAGCTCCGAGAAC | |
| | | AGCGAAAACTCAGACAGGGAATCCAGTGCCTATTCGAGCAACTAA | |
| | | TAACAACTCAGCAGGGGGTCCACAAAAACCCATTGTTAGAGTAG | |
| ABD34298.1 | DQ187000.1 | ATGGCATGGAGATGGTGGAAGCGACGGAGGCGCTGGTGGTTCCG | 203 |
| | | CAAGCGGTGGACCCGTGGCAGACTTCGCAGACGATGGCCTCGAC | |
| | | CAGCTCGTCGCCGACCTAGACGACGAAGAGTAAGGAGACGCAGA | |
| | | CGTTGGAGGAGGGGGCGACCCAGACGTAGACTGTACCGACGCTA | |
| | | CAGACGCAAAAAACATAGGAGACGAAAGCCCAAAATAATCTTAAAA | |
| | | CAATGGCAGCCAGACATTGTAAAGAGGTGCTACATAGTGGGCTAC | |
| | | ATTCCTGCCATAATATGTGGGGCGGGCACCTGGTCTCACAACTAC | |
| | | ACCAGCCACCTTCTAGACATTATCCCCAAGGGACCCTTTGGAGGA | |
| | | GGGCACAGCACTATGAGGTTCTCCCTAAAAGTACTCTTTGAAGAAC | |
| | | ACCTCAGACACTTAAACTTTTGGACAAAGAGTAACCAGGACCTAGA | |
| | | ACTGATAAGATACTTTAGATGCTCCTTTAAATTTTATAGAGACCAAG | |
| | | ACACAGACTACATAGTACACTACAGCAGAAAAACTCCCCTGGGAG | |
| | | GCAACAGACTGACAGCACCTAACCTGCACCCAGGGGTACAAATGC | |
| | | TTAGCAAAAACAAAATAATGGTACCTAGCTATGCTACAAAACCCAA | |
| | | GGGTCCTAGCTATATAAAAGTAACCATAGCACCCCCCACACTGCTA | |
| | | ACTGACAAGTGGTACTTTAGCAAAGACGTTTGTGACACAACCTTGG | |
| | | TTAACTTAGACGTTGTACTCTGCAACCTGCGGTTTCCGTTCTGCTC | |
| | | ACCACAAACTGACAACCCTTGCATCACATTCCAAGTTCTGCATTCC | |
| | | ATCTACAACGACTTCCTCTCTATAGTAGATACTAACAACTATAAAGA | |
| | | ATCTTTTGTTAGTGCATTACCAACAAAAGTATCTACTGACTGGGGC | |
| | | AAAAGACTAAACACCTTTAGAACAGAAGGATGCTATTCACACCCCA | |
| | | AATTACATAAAAAAGCTGTAACAGCTGCTACAGATACAGAATACTTT | |
| | | ACAAAGCCAGATGGTCTGTGGGGAGACACTATATTTGATGTAGAAA | |
| | | ATGGACAAAAAATTATAAAAAATATGGAGTCATATGCTAAGTCAGC | |
| | | CAAAGAAAGAGGGATCAATGGAGACCCTGCTTTCTGTCACTTAACA | |
| | | GGAATATACTCACCTCCCTGGTTAACACCAGGGAGAATATCTCCAG | |
| | | AAACACCTGGACTTTACACAGACGTGACTTACAACCCTTACGCTGA | |
| | | CAAAGGAGTGGGCAACAGAATATGGGTTGACTACTGCAGTAAAAA | |
| | | AGGCAACAAATATGACAATACAAGTAAATGCCTTTTAGAAGACATG | |
| | | CCACTATGGATGGTATGCTTTGGCTATGTAGACTGGGTAAAAAAAG | |
| | | AAACCGGCAACTGGGGCATTCCACTATGGGCTAGAGTACTTATAA | |
| | | GAAGCCCATATACTGTTCCCAAACTATATAATGAAGCAGACCCAAA | |
| | | CTATGGATGGGTACCTATTTCTTACTATTTTGGAGAAGGCAAAATG | |
| | | CCAAACGGAGACATGTACATACCATTTAAAATAAGAATGAAGTGGT | |
| | | ACCCTTCAATGTGGAACCAAGAGCCAGTATTAAATGACTTAGCAAA | |
| | | GAGCGGACCGTTTGCATACAAAAACACCAAAACAAGTGTGACTGT | |
| | | GACTGCCAAATATAAATTCACATTTAACTTCGGTGGCAACCCCGTA | |
| | | CCCTCACAGATTGTACAAGATCCCTGCACACAGCCCACCTACGAC | |
| | | ATCCCCGGCACCGGTAACCTGCCTCGCAGAATACAAGTCATTGAC | |
| | | CCGAAAGTCCTCGGTCCCCACTATTCCTTCCACCGGTGGGACTTC | |
| | | AGACGTGGCCTGTTTGGCTCACAAGCTATTAAGAGAGTGTCAGAA | |
| | | CAATCAACAACTTCTGAGTTTTTATTCTCAGGCCCAAAGAAACCCA | |
| | | GAATCGATCAAGGTCCTTACATCCCGCCAGAAAAAGGCTCAGGTT | |
| | | CACTCCAAAGAGAACCGAGACCGTGGAGCAGCTCGGAGACCGAG | |
| | | GCAGAGACAGAAGCCCCCTCGGAAGAAGAGCCGGAGAACCAAGA | |
| | | AGAACAAGTACTCCAGTTGCAGCTCAGACAGCAGCTCCGAGAACA | |
| | | GCGAAAACTCAGACAGGGAATCCAGTGCCTATTCGAGCAACTAAT | |
| | | AACAACTCAGCAGGGGGTCCACAAAAACCCATTGTTAGAGTAG | |
| ABD34300.1 | DQ187001.1 | ATGGCACGGAGATGGTGGAAGCGACGGAGGCGCTGGTGGTTCCG | 204 |
| | | CAAGCGGTGGACCCGTGGCAGACTTCGCAGACGATGGCCTCGAC | |
| | | CAGCTCGTCGCCGACCTAAACGACGAAGAGTAAGGAGACGCAGA | |
| | | CGTTGGAGGAGGGGGCGACCCAGACGTAGACTGTACCGACGCTA | |
| | | CAGACGCAAAAAACGTAGGAGACGAAAGCCCAAAATAATCTTAAAA | |
| | | CAATGGCAGCCAGACATTGTAAAGAGGTGCTACATAGTGGACTAC | |
| | | ATTCCTGCCATAATATGTGGGGCGGGCACCTGGTCTCGCAACTAC | |
| | | ACCAGCCACCTTCTAGACATTATCCCCAAGGGACCCTTTGGAGGA | |
| | | GGGCACAGCACTATGAGGTTCTCCCTAAAAGTACTCTTTGAAGAAC | |
| | | ACCTCAGGCACTTAAACTTTTGGACAAAGAGTAACCAGGACCTAGA | |
| | | ACTGATAAGATACTTTAGATGCTCCTTTAAATTTTATAGAGACCAAG | |
| | | ACACAGACCACATAGTACACTACAGCAGAAAAACTCCCCTGGGAG | |
| | | GCAACAGACTGACAGCACCTAACCTGCACCCAGGGGTACAAATGC | |
| | | TTAGCAAAAACAAAATAATAGTACCTAGCTATGCTACAAAACCCAA | |
| | | GGGTCCTAGCTATATAAAAGTAACCATAGCACCCCCCACACTGCTA | |
| | | ACTGACAAGTGGTACTTTAGCAAAGACGTTTGTGACACAACCTTGG | |
| | | TTAACTTAGACGTTGTACTCTGCAACCTGCGGTTTCCGTTCTGCTC | |
| | | ACCACAAACTGACAACCCTTGCATCACATTCCAAGTTCTGCATTCC | |
| | | ATCTACAACGACTTCCTCTCTATAGTAGATACTAACAACTATAAAGA | |
| | | ATCTTTTGTTGCTGCATTACCAACAAAAGTATCTACTGACTGGGGC | |
| | | AAAAGACTAAACACCTTTAGAACAGAGGGATGCTATTCACACCCCA | |
| | | AATTACATAAAAAAGCTGTAACAGCTGCTACAGATACAGAATACTTT | |
| | | ACAAAGCCAGATGGTCTGTGGGGAGACACTATATTTGATGTAGAAA | |
| | | ATGGACAAAAAATTATAAAAAATATGGAATCATATGCTAAGTCAGC | |
| | | CAAAGAAAGAGGGATCAATGGAGACCCTGCTTTCTGTCACTTAACA | |
| | | GGAATATACTCACCTCCCTGGTTAACACCAGGGAGAATATCTCCAG | |
| | | AAACACCTGGACTTTACACAGACGTGACTTACAACCCTTACGCTGA | |
| | | CAAAGGAGTGGGCAACAGAATATGGGTTGACTACTGCAGTAAAAA | |
| | | AGGCAACAAATATGGCAATACAAGTAAATGCCTTTTAGAAGACATG | |
| | | CCACTATGGATGGTATGCTTTGGCTATGTAGACTGGGTAAAAAAAG | |
| | | AAACCGGCAACTGGGGCATTCCACTATGGGCTAGAGTACTTATAA | |
| | | GAAGCCCATATACTGTTCCCAAACTATATAATGAAGCAGACCCAAA | |
| | | CTATGGATGGGTACCTATTTCTTACTATTTTGGAGAAGGCAAAATG | |
| | | CCAAACGGAGACATGTACGTACCATTTAAAATAAGAATGAAATGGT | |
| | | ACCCTTCAATGTGGAACCAAGAGCCAGTATTAAATGACTTAGCAAA | |
| | | GAGCGGACCGTTTGCATACAAAAACACCAAAACAAGTGTGACTGT | |
| | | GACTGCCAAATATAAATTCACATTTAACTTCGGGGGCAACCCCGTA | |
| | | CCCTCACAGATTGTACAAGATCCCTGCACACAGCCCACCTACGAC | |
| | | ATCCCCGGCACCGGTAACCTGCCTCGCAGAATACAAGTCATTGAC | |
| | | CCGAAAGTCCTCGGTCCCCACTATTCCTTCCACCGGTGGGACTTC | |
| | | AGACGTGGCCTGTTTGGCTCACAAGCTATTAAGAGAGTGTCAGAA | |
| | | CAATCAACAACTTCTGAGTTTTTATTCTCAGGCCCAAAGAAACCCA | |
| | | GAATCGATCAAGGTCCTTACATCCCGCCAGAAAAAGGCTCAGGTT | |
| | | CACTCCAAAGAGAACCGAGACCGTGGAGCAGCTCGGAGACCGAG | |
| | | GCAGAGACAGAAGCCCCCTCGGAAGAAGAGCCGGAGAACCAAGA | |
| | | AGAACAAGTACTCCAGTTGCAGCTCAGACAGCAGCTCCGAGAACA | |
| | | GCGAAAACTCAGACAGGGAATCCAGTGCCTATTCGAGCAACTAAT | |
| | | AACAACTCAGCAGGGGGTCCACAAAAACCCATTGTTAGAGTAG | |
| ABD34302.1 | DQ187002.1 | ATGGCATGGAGATGGTGGAAGCGACGGAGGCGCTGGTGGTTCCG | 205 |
| | | CAAGCGGTGGACCCGTGGCAGACTTCGCAGACGATGGCCTCGAC | |
| | | CAGCTCGTCGCCGACCTAAACGACGAAGAGTAAGGAGACGCAGA | |
| | | CGTTGGAGGAGGGAGCGACCCAGACGTAGACTGTACCGACGCTA | |
| | | CAGACGCAAAAAACGTAGGAGACGAAAGCCCAAAATAATCTTAAAA | |
| | | CAATGGCAGCCAGACATTGTAAAGAGGTGCTACATAGTGGGCTAC | |
| | | ATTCCTGCCATAATATGTGGGGCGGGCACCTGGTCTCACAACTAC | |
| | | ACCAGCCACCTTCTAGACATTATCCCCAAGGGACCCTTTGGAGGA | |
| | | GGGCACAGCACTATGAGGTTCTCCCTAAAAGTACTCTTTGAAGAAC | |
| | | ACCTCAGGCACTTAAACTTTTGGACAAAGAGTAACCAGGACCTAGA | |
| | | ACTGATAAGATACTTTAGATGCTCCTTTAAATTTTATAGAGACCAAG | |
| | | ACACAGACTACATAGTACACTACAGCAGAAAAACTCCCCTGGGAG | |
| | | GCAACAGACTGACAGCACCTAACCTGCACCCAGGGGTACAAATGC | |
| | | TTAGCAAAAACAAAATAATAGTACCTAGCTATGCTACAAAACCCAA | |
| | | GGGTCCTAGCTATATAAAAGTAACCATAGCACCCCCCACACTGCTA | |
| | | ACTGACAAGTGGTACTTTAGCAAAGACGTTTGTGACACAACCTTGG | |
| | | TTAACTTAGACGTTGTACTCTGCAAGCTGCGGTTTCCGTTCTGCTC | |
| | | ACCACAAACTGACAACCCTTGCATCACATTCCAAGTTCTGCATTCC | |
| | | ATCTACAACGACTTCCTCTCTATAGTAGATACTAACAACTATAAAGA | |
| | | ATCTTTTGTTGCTGCATTACCAACAAAAGTATCTACTGACTGGGGC | |
| | | AAAAGACTAAACACCTTTAGAACAGAAGGATGCTATTCACACCCCA | |
| | | AATTACATAAAAAAGCTGTAACAGCTGCTACAGATACAGAATACTTT | |
| | | ACAAAGCCAGATGGTCTGTGGGGAGACACTATATTTGATGTAGAAA | |
| | | ATGGACAAAAAATTATAAAAAATATGGAATCATATGCTAAGTCAGC | |
| | | CAAAGAAAGAGGGATCAATGGAGACCCTGCTTTCTGTCACTTAACA | |
| | | GGAATATACTCACCTCCCTGGTTAACACCAGGGAGAATATCTCCAG | |
| | | AAACACCTGGACTTTACACAGACGTGACTTACAACCCTTACGCTGA | |
| | | CAAAGGAGTGGGCGACAGAATATGGGTTGACTACTGCAGTAAAAA | |
| | | AGGCAACAAATATGACAATACAAGTAAATGCCTTTTAGAAGACATG | |
| | | CCACTATGGATGGTATGCTTTGGCTATGTAGACTGGGTAAAAAAAG | |
| | | AAACCGGCAACTGGGGCATTCCACTATGGGCTAGAGTACTTATAA | |
| | | GAAGCCCATATACTGTTCCCAAACTATATAATGAAGCAGACCCAAA | |
| | | CTATGGATGGGTACCTATTTCTTACTATTTTGGAGAAGGCAAAATG | |
| | | CCAAACGGAGACATGTACGTACCATTTAAAATAAGAATGAAATGGT | |
| | | ACCCTTCAATGTGGAACCAAGAGCCAGTATTAAATGACTTAGCAAA | |
| | | GAGCGGACCGTTTGCATACAAAAACACCAAAACAAGTGTGACTGT | |
| | | GACTGCCAAATATAAATTCACATTTAACTTCGGGGGCAACCCCGTA | |
| | | CCCTCACAGATTGTACAAAATCCCTGCACACAGCCCACCTACGAC | |
| | | ATCCCCGGCACCGGTAACCTGCCTCGCAGAACACAAGTCATTGAC | |
| | | CCGAAAGTCCTCGGTCCCCACTATTCCTTCCACCGGTGGGACTTC | |
| | | AGGCGCGGCCTGTTTGGCTCACAAGCTATTAAGAGAGTGTCAGAA | |
| | | CAATCAACAACTTCTGAGTTTTTATTCTCAGGCCCAAAGAAACCCA | |
| | | GAATCGATCAAGGTCCTTACATCCCGCCAGAAAAAGGCTCAGGTT | |
| | | CACTCCAAAGAGAACCGAGACCGTGGAGCAGCTCGGAGACCGAG | |
| | | GCAGAGACAGAAGCCCCCTCGGAAGAAGAGCCGGAGAACCAAGA | |
| | | AGAACAAGTACTCCAGTTGCAGCTCAGACAGCAGCTCCGAGAACA | |
| | | GCGAAAACTCAGACAGGGAATCCAGTGCCTATTCGAGCAACTAAT | |
| | | AACAACTCAGCAGGGGGTCCACAAAAACCCATTGTTAGAGTAG | |
| ABD34305.1 | DQ187004.1 | ATGGCCTGGGGATGGTGGAAACGCAGACGGCGCCGATGGTGGAG | 206 |
| | | AGGCCTCTGGAGGAGACGCCGCTTTGCCAGAAGACGACCTAGAC | |
| | | GGCCTGCTCGCCGCCCTAGACGACGAAGAGTAAGGAGACGCAGA | |
| | | CGGTGGAGGAGGGGGCGACTAAGGAGGCGCGTGTACAACAGGA | |
| | | GACGCAGGATCAGACGAAAGAGACGCAGACAGAAACTGACAATAA | |
| | | GACAGTGGCAGCCTGACAAACGCAGGATATGTAGAATTAAAGGCT | |
| | | ACCTTCCTGCCATTATATATGGAGACGGGACGTTTTCTAAAAACTA | |
| | | TACAAGTCACTTAGAGGACAGAATCTCCAAAGGACCGTTTGGGGG | |
| | | AGGGCACGGGACTGCTAGAATGTCTCTTAAAGTACTGTATGACGA | |
| | | CCACCTAAAAGGACTTAACATATGGACGTATAGTAACAAGGACTTG | |
| | | GAACTGGTCAGATACATGCACACCACAATTACATTTTACAGACACC | |
| | | CAGACACAGACTTTATAGCAGTATACAACAGAAAAACACCACTAGG | |
| | | TGGCAACAGATACACAGCACCCTCACTGCACCCTGGTAACATGAT | |
| | | GCTGCAGAGAACTAAAATACTAATCCCTAGCTTTAAAACCAAACCC | |
| | | AGAGGGAGCGGCAAAATTAGAGTAGTAATAAAACCCCCCACTCTG | |
| | | TTAGTAGATAAGTGGTACTTTCAAAAGGACATATGCGACGTTACAC | |
| | | TGTTTAACCTCAACATTACAGCAGCTAGCCTGCGGTTTCCGTTCTG | |
| | | CTCACCACAAACGAACAACCCTTGTGTAACATTCCAAGTTCTGCAT | |
| | | TCTGTGTATGACAAAGCATTAGGCATTAACACATTTGGTACCAAAG | |
| | | AAACACCAGAAGATCAGCAAATGGAAGATATTAAAAACTGGCTTAC | |
| | | CAAAGCTCTAAATACTGCAGGCTTTACTGTACTAAATACATTTAGAA | |
| | | CAGAAGGTATATACTCACACCCACAACTAAAAAAACCACCTGAAGG | |
| | | AAGTAACAAACCTAGTGCAGAACAGTACTTTGCTCCACTAGACAGC | |
| | | TTATGGGGAGACAAGATATATGTAAATAATAATACTAGTCCTTCACA | |
| | | AACAGAAGCAACAATTCCAGGTATATTAGCCAGAAATGCTTGCACA | |
| | | TACTATCAAAAAGCTAAAACAAGCACACTAAGGCAGCACCTAGGC | |
| | | GCTATGGCACACTGTCACCTAACAGGAATTTTTAACCCTGCACTAC | |
| | | TAACACAGGGCAGACTATCACCAGAATTTTTTGGCCTATACAAAGA | |
| | | AATTATTTATAACCCCTATGATGACAAAGGCAAAGGAAACAGAATA | |
| | | TGGATAGACCCATTAACAAAACCTGACAACATATTTGATGCTAGAA | |
| | | GTAAAGTAGAACTAGAAGATATGCCTCTTTGGATGGCATGCTTTGG | |
| | | ATATAATGACTGGTGTAAAAAAGAGCTAAATAACTGGGGCCTAGAA | |
| | | GTAGAATACAGAGTACTACTAAGATGCCCTTACACATATCCAAAAC | |
| | | TGTACAATGATGCTAACCCAAACTATGGCTATGTACCTATATCCTA | |
| | | CAACTTTAGTGCAGGAAAAACTGTAGAAGGGGATCTTTATGTTCCA | |
| | | ATAATGTGGAGAACTAAATGGCATCCAACAATGTACAATCAATCTC | |
| | | CAGTACTAGAAGATTTAGCCATGGCAGGGCCTTTTGCTCCAAAAGA | |
| | | AAAAATACCTAGCAGCACACTTACAATAAAATACAAAGCTAAATTTA | |
| | | TATTCGGGGGCAATCCTATATCTGAACAGATTGTCAAGGACCCCTG | |
| | | CACCCAGCCCACCTACGAAATTCCCGGAGGCGGTACGCTCCCTC | |
| | | GCAGAATACAAGTCATTAACCCGGAATACATCGGGCCACACTACT | |
| | | CATTCAAAAGCTTCGACATCAGACGTGGGTACTTTAGCGCGAAGA | |
| | | GTGTTAAAAGAGTGTCAGAACAATCAGACATTACTGAGTTTATATTC | |
| | | TCAGGTCCAAAAAAGCCAAGGATCGACCAAGACAGGTACCAAGAA | |
| | | GCAGAAGAACACTCAGATTCTCGACTCCGAGAAGAGAAACCGTGG | |
| | | GAGAGCTCGCAAGAAACAGAGAGCGAAGCCCAAGAAGAAGAGAT | |
| | | ACAAGAGACAAACATCCAGCTCCAGCTGCAGCACCAGCTCAAAGA | |
| | | GCAACTGCAGCTCAGACGGGGAATCCAGTGCCTCTTCGAGCAACT | |
| | | AACCAAAACCCAGCAGGGAGTCCACATAAACCCTTCCCTCGTGTAG | |
| ABD34307.1 | DQ187005.1 | ATGTCTCTTAAAGTACTGTATGACGACCACCTAAAAGGACTTAACA | 207 |
| | | TATGGACGTATAGTAACAAGGACTTGGAACTGGTCAGATACATGCA | |
| | | CACCACAATTACATTTTACAGACACCCAGACACAGACTTTATAGCA | |
| | | GTATACAACAGAAAAACACCACTAGGTGGCAACAGATACACAGCA | |
| | | CCCTCACTGCACCCTGGTAACATGATGCTGCAGAGAACTAAAATAC | |
| | | TAATCCCTAGCTTTAAAACCAAACCCAGAGGGAGCGGCAAAATTAG | |
| | | AGTAGTAATAAAACCCCCCACTCTGTTAGTAGATAAGTGGTACTTT | |
| | | CAAAAGGACATATGCGACGTTACACTGTTTAACCTCAACATTACAG | |
| | | CAGCTAGCCTGCGGTTTCCGTTCTGCTCACCACAAACGAACAACC | |
| | | CTTGTGTAACATTCCAAGTTCTGCATTCTGTGTATGACAAAGCATTA | |
| | | GGCATTAACACATTTGGTACCAAAGAAACACCAGAAGATCAGCAAA | |
| | | TGGAAGATATTAAAAACTGGCTTACCAAAGCTCTAAATACTGCAGG | |
| | | CTTTACTGTACTAAATACATTTAGAACAGAAGGTATATACTCACACC | |
| | | CACAACTAAAAAAACCACCTGAAGGAAGTAACAAACCTAGTGCAGA | |
| | | ACAGTACTTTGCTCCACTAGACAGCTTATGGGGAGACAAGATATAT | |
| | | GTAAATAATAATACTAGTCCTTCACAAACAGAAGCAACAATTCCAG | |
| | | GTATACTAGCCAGAAATGCTTGCACATACTATCAAAAAGCTAAAAC | |
| | | AAGCACACTAAGGCAGCACCTAGGCGCTATGGCACACTGTCACCT | |
| | | AACAGGAATTTTTAACCCTGCACTACTAACACAGGGCAGACTATCA | |
| | | CCAGAATTTTTTGGCCTATACAAAGAAATTATTTATAACCCCTATGA | |
| | | TGACAAAGGCAAAGGAAACAGAATATGGATAGACCCATTAACAAAA | |
| | | CCTGACAACATATTTGATGCTAGAAGTAAAGTAGAACTAGAAGATA | |
| | | TGCCTCTTTGGATGGCATGCTTTGGATATAATGACTGGTGTAAAAA | |
| | | AGAGCTAAATAACTGGGGCCTAGAAGTAGAATACAGAGTACTACTA | |
| | | AGATGCCCTTACACATATCCAAAACTGTACAATGATGCTAACCCAA | |
| | | ACTATGGCTATGTACCTATATCCTACAACTTTAGTGCAGGAAAAAC | |
| | | TGTAGAAGGGGATCTTTATGTTCCAATAATGTGGAGAACTAAATGG | |
| | | TATCCAACAATGTACGATCAATCTCCAGTACTAGAAGATTTAGCCA | |
| | | TGGCAGGGCCTTTTGCTCCAAAAGAAAAAATACCTAGCAGCACACT | |
| | | TACAATAAAATACAAAGCTAAATTTATATTCGGGGCAATCCTATATC | |
| | | TGAACAGATTGTCAAGGACCCCTGCACCCAGCCCACCTACGAAAT | |
| | | TCCCGGAGGCGGTACGCTCCCTCGCAGAATACAAGTCATTAACCC | |
| | | GGAATACATCGGGCCACACTACTCATTCAAAAGCTTCGACATCAGA | |
| | | CGTGGGTACTTTAGCGCGAAGAGTGTTAAAAGAGTGTCAGAACAA | |
| | | TCAGACATTACTGAGTTTATATTCTCAGGTCCAAAAAAGCCAAGGA | |
| | | TCGACCAAGACAGGTACCAAGAAGCAGAAGAACACTCAGATTCTC | |
| | | GACTCCGAGAAGAGAAACCGTGGGAGAGCTCGCAAGAAACAGAG | |
| | | AGCGAAGCCCAAGAAGAAGAGATACAAGAGACAAACATCCAGCTC | |
| | | CAGCTGCAGCACCAGCTCAAAGAGCAACTGCAGCTCAGACGGGG | |
| | | AATCCAGTGCCTCTTCGAGCAACTAA | |
| ABD61942.1 | DQ361268.1 | ATGGCCTGGAGATGGTGGTGGAGACGCAGGCGCCCGTGGCGATG | 208 |
| | | GAGATGGAGGCGAAGGAGACGACCAGCTAGACGCCGAAGACGTA | |
| | | GAAGACCTGCTCGGCGTGCTAGACGACCCAGAGTAAGGAGATGG | |
| | | CGCAGGCGCAGGGTGTGGGCGCCCAGGCCATACATAAGAAGGCG | |
| | | CAGGCGAAGCTTCCGTAGAAAAAAAATTAAAATAACTCAGTGGAAC | |
| | | CCCGCTGTTACTAAAAAATGTACTGTAACTGGGTACCTACCAGTTA | |
| | | TATACTGTGGAACCGGGGACATAGGAACCACTTTTCAGAACTTTGG | |
| | | CTCTCATATGAATGAGTACAAACAGTATAACGCTGCGGGAGGGGG | |
| | | CTTTAGCACAATGCTTTTTACCATGCAAAACCTGTATGAAGAGTAC | |
| | | CAAAAACATAGATGCAGATGGTCTAAAAGCAATCAAGACCTAGACC | |
| | | TGTGTAGATATCTAGACTGTAAACTAACATTTTACAGATCCCCTAAC | |
| | | ACAGACTTTATAGTTGGCTACAATAGAAAGCCTCCCTTTATAGACA | |
| | | CTCAAATAACAAGATGTACTTTACATCCAGGAATGCTAATACAAGA | |
| | | AAGAAAAAAAGTAATAATACCTAGCTTCCAAACCAGGCCAAAAGGT | |
| | | AGAATAAAACGCAAAATTAAAGTAAGGCCCCCCACCTTATTCACAG | |
| | | ACAAATGGTACTTTCAGAGAGACCTCTGTAAAGTTCCTCTTGTAAC | |
| | | GGTTTCCGCTTCTGCGGCGAGCCTGCGGTTTCCGTTCGGCTCACC | |
| | | ACAAACAGAAAACTATTGCATATACTTCCAGGTTTTAGATCCCTGG | |
| | | TACCACACCCGCCTGAGCATAACTGGTGGAAAGCCAGCTGAATAT | |
| | | TGGACACAGCTAAAAGCTTATTTAACTCAAGGCTGGGGCAGGTCA | |
| | | ACAAATAATGCAGGATATCAACATGGTCCACTAGGTACTTACTTTA | |
| | | ATACACTTAAAACATCAGAACATATTAGACAACCCCCAGCAGATAA | |
| | | CTACAAACAAGCAAATAAAGATACTACATACTATGGAAGAGTAGAC | |
| | | AGTCACTGGGGAGATCATGTATACCAACAAACAATAATACAAGCCA | |
| | | TGGAAGAAAACCAAAGCAACATGTACACAAAAAGAGCACTTCACAC | |
| | | ATTCTTAGGCAGTCAATATCTAAACTTTAAATCAGGTCTATTTAGCA | |
| | | GTATATTTCTAGATAATGCCAGACTAAGCCCAGACTTTAAAGGTAT | |
| | | GTACCAAGAAGTTGTTTATAACCCCTTTAATGACAGAGGAGTAGGC | |
| | | AACAAAGTATGGGTTCAGTGGTGCACAAACGAGGACACAATATTTA | |
| | | AAGACCTACCAGGCAGAGTTCCTGTGGTAGATTTACCATTGTGGT | |
| | | GCGCGTTAATGGGCTACTCAGACTACTGCAAAAAATATTTCCACGA | |
| | | CGATGGCTTCTTAAAAGAGGCCAGAATAACTATAATCAGCCCATAC | |
| | | ACAAATCCTCCACTAATTAACAACAAAAATACAAATGAGGGCTTTGT | |
| | | ACCCTACAGTTTCTACTTTGGAAAAGGCAGAATGCCAGACGGCAAT | |
| | | GGGTACATACCCATAGACTTTAGATTTAACTGGTACCCTTGCATAT | |
| | | TTCACCAAACAAACTGGATAAATGACATGGTTCAATGCGGACCCTT | |
| | | TGCCTACCACGGAGATGAAAAGAACTGTTCTCTCACTATGAAATAC | |
| | | AAGTTTAAATTTCTATTTGGGGGCAATCCTATCTCACAACAGACTAT | |
| | | CAAAGACCCTTGCCAACAACCCGACTGGCAACTTCCCGGTTCCGG | |
| | | TAGATTCCCTCGCGATGTACAAGTATCGAACCCGCGCTTGCAAAC | |
| | | CGAAGGGTCCACGTTCCACGCGTGGGACTTCAGACGGGGTTTCTA | |
| | | TGGCAAAAGAGCTATTGAAAGACTGCAGGGACAACAAGATGATGT | |
| | | TACATATATTGCAGGACCTCCAAAAAGGCCCCGCTTCGAGGTCCC | |
| | | AGCCCTGGCTGCCGAAGGAAGCTCAAATACACGCCGATCAGAGTT | |
| | | GCCATGGCAAACCTCAGAAGAAGAAAGCTCGCAAGAAGAAAACTC | |
| | | AGAAGAGACAGAAGAAGAAACCTCGTTATCGCAGCAGCTCAAGCA | |
| | | GCAGTGCATCGAGCAGAAGCTCCTCAAGCGAACGCTCCACCAACT | |
| | | CGTCAAGCAATTAGTAAAGACCCAGTATCACCTACACGCCCCCATT | |
| | | ATCCACTAA | |
| ABU55887.1 | EF538879.1 | ATGGCATGGAGATGGTGGAAGCGACGGAGGCGCTGGTGGTTCCG | 209 |
| | | CAAGCGGTGGACCCGTGGCAGACTTCGCAGACGATGGCCTCGAC | |
| | | CAGCTCGTCGCCGCCCTAGACGACGAAGAGTAAGGAGACGCAGA | |
| | | CGGTGGAGGAGGGGGCGACCCAGACGCAGACTGTACCGACGCTA | |
| | | CAGACGCAAAAAACGTAGGAGACGAAAGCCCAAAATAATCTTAAAA | |
| | | CAATGGCAGCCAGACATTGTAAAAAGATGCTATATAATAGGCTACA | |
| | | TTCCTGCCATAATATGTGGGGCTGGCACCTGGTCCCACAACTACA | |
| | | CCAGCCACCTGTTAGACATTATCCCCAAGGGACCCTTTGGAGGAG | |
| | | GGCACAGCACTATGAGATTCTCCCTAAAAGTACTCTTTGAAGAACA | |
| | | CCTCAGACACTTAAACTTTTGGACAAAAAGCAACCAGGACCTAGAA | |
| | | CTTATAAGATACTTTAGATGCTCCTTTAAATTCTATAGAGACCAAGA | |
| | | CACAGACTACATAGTACACTACAGCAGAAAGACTCCCCTAGGAGG | |
| | | CAACAGACTGACAGCACCTAGCCTACACCCCGGGGTACAGATGCT | |
| | | TAGCAAAAACAAAATATTAGTACCTAGCTATGCTACAAAACCCAAG | |
| | | GGTGGTAGCTATGTAAAAGTAACCATAGCACCCCCCACACTACTAA | |
| | | CTGACAAGTGGTACTTTAGCAAAGACGTTTGTGACACAACCTTGGT | |
| | | TAACTTAGACGTCGTACTCTGCAACTTGCGGTTTCCGTTCTGCTCA | |
| | | CCACAAACTGACAACCCTTGCATCACATTCCAAGTTCTGCATTCTT | |
| | | ACTACAACGACTACCTCTCTATAGTAGACACCGCCTTATACAAAAC | |
| | | CAGCTTTGTAAACAATTTAAGTACAAAACTAGGTACAACATGGGCA | |
| | | AACAGACTAAACACATTTAGAACAGAAGGCTGCTACTCACATCCAA | |
| | | AATTGCTCAAAAAAACAGTAACAGCTGCAAATGACACCAAATATTTT | |
| | | ACTACACCAGACGGACTCTGGGGAGATGCAGTATTTGATGTTTCA | |
| | | GACGCAAAAAAACTAACTAAAAACATGGAAAGTTATGCTGCCTCTG | |
| | | CTAACGAAAGAGGCGTACAAGGAGACCCTGCCTTTTGCCACCTAA | |
| | | CAGGCATATTCTCACCTCCCTGGCTAACACCAGGCAGAATATCTCC | |
| | | TGAAACCCCAGGACTTTACACAGACGTGACTTACAACCCATACGCA | |
| | | GACAAAGGAGTGGGCAACAGAATATGGGTTGACTACTGTAGTAAA | |
| | | AAAGGCAATAAATATGACAATACAAGTAAATGCGTGTTAGAAGACA | |
| | | TGCCACTATGGATGTTATGCTTTGGCTATGTAGACTGGGTAAAAAA | |
| | | AGAGACTGGCAACTGGGGCATTCCACTATGGGCCAGAGTACTTAT | |
| | | AAGAAGCCCATATACTGTCCCAAAACTATACCATGAAAACGACCCT | |
| | | GACTACGGATGGGTTCCAATTTCCTACTACTTTGGAGAAGGCAAAA | |
| | | TGCCAAACGGAGACATGTACGTACCATTTAAAGTAAGAATGAAATG | |
| | | GTACCCTTCAATGTGGAACCAAGAGCCAGTTTTAAATGACTTAGCA | |
| | | AAGAGCGGACCGTTTGCATACAAGAACACCAAAACAAGCGTGACT | |
| | | GTGACTGCCAAATATAAATTCACATTTAACTTCGGGGGCAACCCCG | |
| | | TACCCTCACAGATTGTACAAGATCCCTGCACACAGCCCACCTACG | |
| | | ACATCCCCGGCACCGGTAACCTGCCTCGCAGAATACAAGTCATTG | |
| | | ACCCGAAAGTCCTCGGTCCCCACTATTCCTTCCACCGGTGGGACT | |
| | | TCAGGCGTGGCCTCTTTGGCACACAAGCTATTAAAAGAGTGTCAG | |
| | | AACAATCAACAACTTCTGAGTTTTTATTCTCAGGCCCAAAGAAACC | |
| | | CAGAATCGATCAAGGCCCTTACATCCCGCCAGAAAAAGGCTCAGG | |
| | | TTCACTCCAAAGAGAATCGAGACCGTGGAGCAGCTCGGAGACCGA | |
| | | GGCAGAGACAGAAGCCCCCTCGGAAGAGGAGCCGGAGAACCAAG | |
| | | AAGAACAAGTACTCCAGTTGCAGCTCAGACAGCAGCTCCGAGAAC | |
| | | AGCGAAAACTCAGACAGGGAATCCAGTGCCTATTCGAGCAACTGA | |
| | | TAACAACCCAGCAGGGGGTCCACAAAAACCCATTGTTAGAGTAG | |
| ABY26045.1 | EU305675.1 | ATGGCCTGGTGGGGACGGTGGAGAAGATGGCGCTGGAGGCCCC | 210 |
| | | GTCGCTGGCGGCGCCGTCGCAGACGCCGAGTACCAAGAAGAAGA | |
| | | GCTCAACGCTCTGTTCGACGCCGTCGAGCAAGAAGAGTAAGGAG | |
| | | GAGGCGATGGGGGAGGCGGAGGTGGAGACGGGGGTACAGACGC | |
| | | AGACTGAGACTAAGACGCAAACGCAAACGAAAACGCAGACTTGTA | |
| | | CTGACTCAGTGGCACCCCGCTAAAGTAAGGAGGTGCAGAATATCT | |
| | | GGGGTCCTACCCATGATACTGTGCGGTGCTGGCAGGAGTAGCTTT | |
| | | AACTACGGGCTGCACAGCGATGACTTTACTAAACAGAAACCAAACA | |
| | | ATCAGAACCCGCACGGCGGGGGCATGAGCACTGTGACTTTTAACC | |
| | | TAAAGGTGCTCTTTGACCAATACGAAAGATTTATGAACAAGTGGTC | |
| | | GTACCCCAACGACCAACTAGACCTCGCCAGATACAAAGGCTGTAA | |
| | | ATTCACCTTCTACAGACACCCAGAAGTTGACTTTCTAGCTCAATAT | |
| | | GACAACGTTCCCCCTATGAAAATGGACGAACTGACTGCCCCTAAC | |
| | | ACTCACCCCGCACTGCTGCTACAGAGCAGACACAGGGTAAAGATA | |
| | | TACAGCTGGAAAACCAGGCCATTTGGCTCTAAAAAAGTAACAGTAA | |
| | | AAATAGGACCCCCCAAACTGTTTGAAGACAAGTGGTACAGCCAGT | |
| | | CTGACTTGTGCAAAGTTTCCCTTGTCAGTTGGCGGTTAACCGCATG | |
| | | TGACTTCAGGTTTCCGTTCTGCTCACCACAAACTGACAACCCTTGT | |
| | | GTAACCTTCCAGGTGCTAGGAGAACAGTATTACGAAGTCTTTGGAA | |
| | | CTTCCGTATTGGACGTTCCTGCATCCTATAACTCACAAATAACTAC | |
| | | ATTTGAACAATGGCTATATAAAAAATGCACCCACTATCAAACATTCG | |
| | | CCACAGACACCAGATTAGCCCCCCAAAAGAAAGCAACCACATCCA | |
| | | CCAACCACACATATAACCCCAGTGGCAACACTGAATCATCAACATG | |
| | | GACACAAAGTAACTACTCCAAATTTAAACCAGGCAACACAGACAGC | |
| | | AACTATGGCTACTGCAGTTATAAAGTAGACGGCGAAACATTTAAGG | |
| | | CCATTAAAAATTACAGAAAGCAAAGATTCAAATGGCTAACCGAATA | |
| | | CACAGGAGAGAATCACATAAACAGCACATTTGCAAAGGGCAAATAT | |
| | | GATGAATACGAGTACCACCTAGGGTGGTACTCTAACATATTTATAG | |
| | | GCAACCTTAGACACAACCTGGCATTCCGCTCAGCATACATAGATGT | |
| | | AACTTACAACCCCACAGTAGACAAAGGCAAAGGCAACATAGTGTG | |
| | | GTTCCAGTACCTGACAAAACCCACCACACAGCTGATAAGAACACA | |
| | | GGCAAAATGCGTTATAGAAGACCTGCCACTTTACTGTGCCTTTTTT | |
| | | GGCTACGAGGACTATATACAGAGAACACTAGGCCCTTACCAGGAC | |
| | | ATAGAGACAGTAGGCGTCATCTGCTTTATAAGCCCCTACACAGAAC | |
| | | CTCCATGTATTAGAAAAGAAGAGCAAAAAAAGGACTGGGGCTTTGT | |
| | | ATTTTATGACACCAACTTTGGAAACGGAAAAACACCAGAGGGCATA | |
| | | GGCCAAGTTCACCCCTACTGGATGCAGAGGTGGAGAGTAATGGCC | |
| | | CAGTTTCAAAAAGAAACTCAAAACAGAATTGCCAGGAGCGGACCG | |
| | | TTTAGCTACAGAGACGACATACCCTCAGCCACACTGACTGCCAACT | |
| | | ACAAGTTCTACTTTAACTGGGGGGGCGACTCTATATTTCCACAGAT | |
| | | TATTAAGAACCCCTGCCCCGACACCGGGCTGCGACCCAGTGGCC | |
| | | ATAGAGAGCCTCGCTCAGTACAAGTCGTTAGCCCGCTCACCATGG | |
| | | GACCAGAGTTCATATTCCACCGCTGGGACTGGCGACGGGGGTTCT | |
| | | ATAATCCAAAAGCTCTCAAACGAATGCTTGAAAAATCAGATAATGAT | |
| | | GCAGAGTCTTCAACAGGCCCAAAAGTGCCTCGGTGGTTTCCAGCA | |
| | | CACCACGACCAAGAGCAAGAAAGCGACTTCGATTCACAAGAGACA | |
| | | AGGTCGCAGTCCTCGCAAGAAGAAGCCGCTCAAGAAGCCCTCCAA | |
| | | GACGTCCAAGAGACGTCGGTACAGCAGTACCTCCTCAAGCAGTTC | |
| | | CGAGAGCAGCGGCTACTCGGACAGCAACTCCGCCTCCTCATGCTC | |
| | | CAACTCACCAAGACGCAAAGCAATCTCCACATAAATCCCCGTGTCC | |
| | | TTGACCATGCATAA | |
| ABY26046.1 | EU305676.1 | ATGTTCTGGTGGGGATGGCGCCGCCGATGGTGGTGGAAGCCACG | 211 |
| | | GAGGCGATGGAGACGCAGGAGGGCGCGCCGCCCGAGACGAGTA | |
| | | CCGCGAAGACGATATAGAAGAGCTGCTCGCCGCTATCGAGGCAG | |
| | | ACGAGTAAGGAGGCGCCGCGCGGGGGGCTGGCGGGGGCGACGT | |
| | | AGATACTCCCGACACTATAGCAGACGACTGACTGTCAGGCGAAAG | |
| | | AAAAAGAAACTGACTCTTAAGATCTGGCAGCCACAGAATATCAGGA | |
| | | AATGTAGAATAAGGGGTCTCCTGCCCCTCCTGATATGCGGGCACA | |
| | | CCCGTTCGGCCTTTAACTATGCCATCCACTCGGATGACAAGACCC | |
| | | CCCAACAGGAGAGTTTCGGGGGCGGCCTCAGCACCGTCAGCTTC | |
| | | TCCTTAAAAGTACTGTTTGACCAGAACCAGAGGGGACTTAATAGGT | |
| | | GGTCGGCCAGCAACGACCAACTGGACCTTGCTCGGTACCTGGGG | |
| | | TGCACTTTCTGGTTCTACAGAGACAAAAAGACTGATTTTATAGTGC | |
| | | AGTATGATATCAGCGCCCCCTTCAAGCTGGACAAAAACAGCAGTC | |
| | | CCAGCTACCACCCCTTCATGCTCATGAAGGCAAAACACAAGGTGC | |
| | | TAATTCCCAGCTTTGACACTAAACCCAAGGGCAGGGAAAAAATTAA | |
| | | AGTTAGAATACAGCCCCCCAAAATGTTCATAGACAAGTGGTACACA | |
| | | CAAGAGGACCTGTGTCCCGTTATTCTTGTGTCACTTGCGGTTAGC | |
| | | GTAGCTTCCTTTACACATCCGTTCTGCTCACCACAAACTGCCAATC | |
| | | CTTGCATCACCTTCCAGGTTTTGAAAGAGTTCTATTACCCAGCCAT | |
| | | GGGCTATGGGGCCCCTGAAACAACTGTCACTTCTGTATTTAACACT | |
| | | TTATATACCACAGCCACCTACTGGCAGTCTCACCTTACCCCCCAGT | |
| | | TTGTCAGAATGCCCACCAAAAACCCAGACAATACTGAAAACAACCA | |
| | | AGCTCAAGCCTTTAATACCTGGGTTGATAAAGATTTCAAAACAGGC | |
| | | AAGTTAGTAAAGTATAACTTTCCCCAGTATGCTCCTTCAATAGAGAA | |
| | | ACTAAAACAATTAAGAACATACTACTTTGAATGGGAAACTAAACACA | |
| | | CTGGGGTTGCAGCACCACCTACCTGGACCACCCCTACCTCAGACA | |
| | | GATACGAGTACCATATGGGAATGTTCAGTCCCACTTTCCTCACACC | |
| | | GTTCAGGTCAGCTGGCCTAGACTTTCCCGGAGCCTACCAGGACGT | |
| | | CACCTACAATCCCCTCACAGACAAGGGGGTGGGCAACAGAATGTG | |
| | | GTTCCAATACAACACCAAGATAGACACTCAGTTCGACGCCAGGTC | |
| | | CTGCAAGTGCGTACTAGAGGACATGCCCCTGTACGCCATGGCCTA | |
| | | CGGGTATGCAGACTTTTTAGAGCAAGAGATAGGAGAGTACCAGGA | |
| | | CCTAGAGGCCAACGGGTACGTCTGTGTAATAAGCCCCTACACCAA | |
| | | ACCCCCAATGTTCAACAAACACAACCCGCAACAGGGGTACGTATT | |
| | | CTATGACTCTCAGTGGGGCAACGGCAAGTGGATAGACGGAACCG | |
| | | GGTTCGTGCCCGTCTACTGGCTGACCAGATGGAGAGTAGAGCTGC | |
| | | TATTTCAGAAAAAAGTACTGTCAGACATCGCCATGTCAGGCCCCTT | |
| | | CAGCTACCCAGACGAACTTAAAAACACTGTACTGACGGCCAAATAC | |
| | | AGATTTGACTTTAAGTGGGGTGGCAATCTCTTCCACCAGCAGACCA | |
| | | TTAGAAACCCCTGCAAACCAGAAGAGACCTCGACCGGTAGAGTCC | |
| | | CTCGCGATGTACAAGTCGTTGACCCGGTCACCATGGGCCCCAGAT | |
| | | TCGTCTTTCACTCCTGGGACTGGAGGCGAGGGTTCCTTAGTGACA | |
| | | GAGCTCTCAAAAGAATGTTTGAAAAACCGCTCGATCTTGAGGGATT | |
| | | TGCAGCGTCTCCAAAACGACCTCGCATATTCCCTCCCACAGAGGG | |
| | | ACAGCTCGCCCGAGAGCAAAAAGAGCAAGAAGAAAGCTCAGATTC | |
| | | GCAGGAAGAAAGCAGCCTTACCTCGCTCGAAGAAGTCCCGGAAGA | |
| | | GACGAAGCTACGACTCCACCTCAGAAAGCAGCTCAGAGAGCAGC | |
| | | GAAGCATCAGACAGCAACTCCGAACCATGTTCCAGCAACTTGTCA | |
| | | AGACGCAAGCGGGCCTACACCTAAACCCCCTTTTATCTTCCCAGC | |
| | | TGTAA | |
| ACK44071.1 | FJ426280.1 | ATGGCCTGGCGATGGTGGTGGCAGAGACGATGGCGCCGCCGCCC | 212 |
| | | GTGGCCCCGCAGACGGTGGAGACGCCTACGACGCCGGAGACCTC | |
| | | GACGACCTGTTCGCCGCCGTCGAAGACGAGCAACAGTAAGGAGG | |
| | | CGGAGGTGGAGGGGCAGACGTGGGCGACGCACATACACCCGAC | |
| | | GCGCGGTCAGACGCAGACGCAGACCCAGAAAGAGATTTGTACTGA | |
| | | CTCAGTGGAGCCCCCAGACAGCCAGAAACTGTTCAATAAGGGGCA | |
| | | TAGTGCCCATGGTAATATGCGGACACACCAGAGCAGGTAGAAACT | |
| | | ATGCCCTTCACAGCGAGGACTTTACCACTCAGATAAGACCCTTTGG | |
| | | AGGCAGCTTCAGCACAACCACCTGGTCCCTAAAAGTACTGTGGGA | |
| | | CGAACACCAGAAATTCCAAAACAGATGGTCCTACCCAAACACACA | |
| | | GCTGGACCTAGCCAGGTACAGGGGGGTCACCTTCTGGTTCTACAG | |
| | | AGACCAGAAAACAGACTATATAGTACAATGGAGCAGAAATCCTCCC | |
| | | TTTAAACTAAACAAATACAGCAGCCCCATGTACCACCCTGGAATGA | |
| | | TGATGCAGGCAAAAAAGAAACTGGTGGTCCCCAGTTTCCAGACCA | |
| | | GACCTAAAGGCAAAAAGAGATACAGAGTCAGAATAAGACCCCCCA | |
| | | ACATGTTCAATGACAAGTGGTACACTCAAGAGGACCTTTGTCCAGT | |
| | | ACCTCTTGTGCAAATTGTGGTTTCTGCGGCTACCCAGACAAAAAAG | |
| | | AACTGCTCACCACAAACGAACAACCCTTGCATCACTTTCCAGGTTT | |
| | | TGAAAGACAAGTACTTAAACTACATAGGAGTTAACTCTTCCGAGAC | |
| | | CCGAAGAAACAGTTATAAAACTCTACAAGAGAAACTTTACTCACAA | |
| | | TGCACATACTTTCAAACCACACAAGTTTTAGCTCAATTATCTCCAGC | |
| | | ATTTCAGCCCGCAAAGAAACCTAACAGAACCAACAACTCAACCAG | |
| | | CACAACACTAGGCAACAAAGTCACAGACCTAAAATCCAACAATGG | |
| | | CAAATTCCACACAGGCAACAACCCAGTGTTTGGCATGTGTTCATAT | |
| | | AAACCCAGCAAGGACATACTATATAAAGCAAACGAATGGTTGTGG | |
| | | GACAATCTCATGGTTGAAAATGATTTACATTCCACATATGGCAAGG | |
| | | CAACCCTTAAATGCATGGAGTACCACACAGGCATTTACAGCTCCAT | |
| | | ATTCCTAAGTCCTCAAAGGTCCCTAGAATTCCCAGCAGCATACCAA | |
| | | GATGTCACATACAACCCAAACTGTGACAGAGCCATAGGCAACCGT | |
| | | GTATGGTTCCAATATGGCACAAAAATGAACACAAACTTTAATGAAC | |
| | | AACAGTGTAAGTGTGTGTTAACAAACATTCCCCTGTGGGCGGCCTT | |
| | | TAACGGCTACCCAGACTTTATAGAACAAGAACTCGGTATCAGCACA | |
| | | GAGGTACACAACTTTGGCATAGTATGTTTCCAGTGCCCCTACACCT | |
| | | TTCCCCCACTCTATGACAAAAAGAACCCAGATAAAGGCTACGTATT | |
| | | TTATGACACCACCTTTGGGAACGGAAAAATGCCAGACGGGTCAGG | |
| | | CCACATTCCCATCTACTGGCAGCAGAGATGGTGGATCAGACTAGC | |
| | | CTTTCAAGTACAAGTCATGCATGACTTTGTACTCACTGGCCCCTTT | |
| | | AGCTACAAAGATGACCTAGCAAACACTACACTAACAGCCAGGTAC | |
| | | AAGTTCAGATTCAAATGGGGCGGTAATATCATCCCCGAACAGATTA | |
| | | TCAAGAACCCGTGTAAGAGAGAACAGTCCCTCGGTTCCTACCCCG | |
| | | ATAGACAACGTCGCGACCTACAAGTTGTTGACCCATCAACCATGG | |
| | | GCCCGATCTACACCTTCCACACATGGGACTGGCGACGGGGGCTTT | |
| | | TTGGTGCAGATGCTATCCAGAGAGTGTCACAAAAACCGGAAGATG | |
| | | CTCTCCGCTTTACAAACCCTTTCAAGAGACCCAGATATCTTCCCCC | |
| | | GACAGACGGAGAAGACTACCGACAAGAAGAAGACTTCGCTTTACA | |
| | | GGAAAGAAGACGGCGCACATCCACAGAAGAAGTCCAGGACGAGG | |
| | | AGAGCCCCCCGCAAAACGCGCCGCTCCTACAGCAGCAGCAGCAG | |
| | | CAGCGGGAGCTCTCAGTCCAGCACGCGGAGCAGCAGCGACTCGG | |
| | | AGTCCAACTCCGATACATCCTCCAAGAAGTCCTCAAAACGCAAGC | |
| | | GGGTCTCCACCTAAACCCCCTATTATTAGGCCCGCCACAAACAAG | |
| | | GTGTATATCTTTGAGCCCCCCAGAGGCCTACTCCCCATAG | |
| ACR20257.1 | FJ392105.1 | ATGGCAGCCTGGTGGTGGGGCAGGCGGAGACGCTGGCGCAGGT | 213 |
| | | GGAGGCGCCGCCGCCTCCCTCGCCGCCGCCGCTGGCGACGGAG | |
| | | GAGACGGTGGCCCAGAAGACGCAGGCGGAGATGGCCGCGCAGA | |
| | | CGCAGACGTCGCAGACCTGCTCGCCGCCCTAGAAGGAGACGCAG | |
| | | ACGCCGAAGGGTAAGGAGACCTCGCCGGCGCCAAAAACTGGTAC | |
| | | TGACTCAGTGGAACCCTCAGACAGTTAGAAAGTGCATTATCAGAG | |
| | | GGTTCGTGCCGCTGTTCCAGTGCAGCAGAACTGCCTACCACAGGA | |
| | | ACTTTGTAGACCACATGGACGACGTGTACACCACGGGTCCCTTCG | |
| | | GGGGCGGCACGGGGTCCATGCTTTTCACCCTGAGCTTCTTCTACC | |
| | | ACGAGTTTAAAAAGCACCACTGCAAGTGGTCCGCCAGCAACAGAG | |
| | | ACTTTGACTTGTGTAGATACAGGGGCACGGTTCTAAAGTTTTATAG | |
| | | ACATCCAGACGTAGACTACATAGTTTGGCTGAACAGAAACCCCCCT | |
| | | TTCCAGGAAAACCTATTAGACGCCATGAGCAGACAGCCCCTCATA | |
| | | ATGTTACAGACTCACAAGTGCATACTGGTGAGGAGCTTTAAAACGC | |
| | | ACCCCAGGGGACCCTCGTACGTCAGAATGAAAGTTAGACCCCCGA | |
| | | GACTACTTACAGACAAGTGGTACTTTCAGTCAGACTTCTGCAACGT | |
| | | TCCGCTTTTCCAGCTACAGTTTGCTCTTGCGGAACTGCGGTTTCCG | |
| | | ATCGGCTCACCACAAACGAACACCACTTGTGTAAACTTCCTGGTGT | |
| | | TAGATAACAGGTACCACTTATTTTTAGATAACAAACCACAACAGTCA | |
| | | GACAACTCACAAAGAGAAGAGAGGGGGCACGGTTATCCCTTTAAC | |
| | | GGTAGTGAGGGAGAAGCTGATAGACTAAAATTCTGGCACAGTTTG | |
| | | TGGAATACAGGCAGATTCCTAAACACCACTCACATTAACACCCTAC | |
| | | AGCCAAACATCTCTAAATTACAAGAACATAAAGCTGAAGACACAGA | |
| | | GGCAAAAACTACCTATAAAAGTTTAATTAACGGTAACAAAAAGGTA | |
| | | TATAACGATAGTCAATACATGCAAAACGTTTGGGCACAAAACAAAA | |
| | | TAAATACCCTTTATGAGGCTATAGCAGAAGAACAATACAGAAAAAT | |
| | | ACAAAAGTACTATAACACCACATACGGGCAGTACCAAAGGCAACTA | |
| | | TTTACAGGCAAGAAGTACTGGGACTACAGAGTAGGCATGTTCAGT | |
| | | CCCACCTTCCTAAGTCCCAGCAGACTAAATCCAGAGATGCCAGGT | |
| | | GCCTACACAGAGATAGCCTATAACCCCTGGACAGACGAGGGCACG | |
| | | GGCAACGTTGTGTGCCTGCAGTACCTAACAAAAGAAACCTCAGAC | |
| | | TACAAGCCACACGCAGGTAGCAAATTCACCATAGAGGACGTACCC | |
| | | CTGTGGATAGCCATGAATGGGTACGTGGACATATGTAAAAAAGAG | |
| | | GGCAAAGATCCAGGCATAAGACTAAACTGCCTTATGTGTATAAGGT | |
| | | GCCCGTACACCAGGCCCAAACTTTACAACCCCAGATACCCCAAAG | |
| | | AACTGTTTGTAGTGTACTCTTACAACTTTGCCCACGGGCGCATGCC | |
| | | CGGGGGGGACAAATACATACCCATGGAGTTTAAGGACAGGTGGTA | |
| | | CCCGTCGCTCATGCACCAGGAAGAGGTCATAGAGGACATAGTCAG | |
| | | GAGCGGCCCCTTTGCCCTAAAAGACCAGACAGAGATGGTTACTTG | |
| | | CATGATGAGGTACTCGGCCCTGTTTAACTGGGGCGGTAATATTATC | |
| | | CGCGAACAGGCCGTGGAAGACCCCTGTAAAAAGAACACCTTTGCC | |
| | | CTTCCCGGAGCCAGTGGAGTCGCTCGCCTACTACAAGTCAGCAAC | |
| | | CCGATCAGGCAGACCCCCAGCACCACCTGGCACTCGTGGGACTG | |
| | | GAGAAGGTCCCTCTTTACACAAACGGGTATTAAAAGAATGCGCGA | |
| | | ACAACAACCGTATGATGAAATTACTTATGCAGGGCCTAAGAGGCCA | |
| | | AAACTCACAGTTCCCGCAGGACCCACCCTCGCTGCCGGAGACGC | |
| | | CTACAACTACTGGGAAAGAAAACCGCTCACCTCGCCCGGAGAGAC | |
| | | GCTCCCGACCCAGACGGAGACAGAGACAGAAGCCCCAGAGGAAG | |
| | | AAGCCCAGCAAGAAGAAGTCCAGGAGGGCCTCCAGCTCCAGCAG | |
| | | CTCTGGGAGCAGCAACTCCAGCAAAAGCGACAGCTGGGAGTCAT | |
| | | GTTCCAGCAACTCCTCCGACTCAGAACGGGGGCGGAAATACACCC | |
| | | GGCCCTCGCATAG | |
| ACR20260.1 | FJ392107.1 | ATGGCAGCCTGGTGGTGGGGCAGGCGGAGACGCTGGCGCAGGT | 214 |
| | | GGAGGCGCCGCCGCCTCCCTCGCCGCCGCCGCTGGCGACGGAG | |
| | | GAGACGGTGGCCCAGAAGACGCAGGCGGAGATGGCCGCGCAGA | |
| | | CGCAGACGTCGCAGACCTGCTCGCCGCCCTAGAAGGAGACGCAG | |
| | | ACGCCGAAGGGTAAGGAGACCTCGCCGGCGCCAAAAACTGGTAC | |
| | | TGACTCAGTGGAACCCTCAGACAGTTAGAAAGTGCATTATCAGAG | |
| | | GGTTCGTGCCGCTGTTCCAGTGCAGCAGAACTGCCTGCCACAGGA | |
| | | ACTTTGTAGACCACATGGACGACGTGTACACCACGGGTCCCTTCG | |
| | | GGGGCGGCACGGGGTCCATGCTTTTCACCCTGAGCTTCTTCTACC | |
| | | ACGAGTTTAAAAAGCACCACTGCAAGTGGTCCGCCAGCAACAGAG | |
| | | ACTTTGACTTGTGTAGATACAGGGGCACGGTTCTAAAGTTTTATAG | |
| | | ACATCCAGACGTAGACTACATAGTTTGGCTGAACAGAAACCCCCCT | |
| | | TTCCAGGAAAACCTATTAGACGCCATGAGCAGACAGCCCCTCATA | |
| | | ATGTTACAGACTCACAAGTGCATACTGGTGAGGAGCTTTAAAACGC | |
| | | ACCCCAGGGGACCCTCGTACGTCAGAATGAAAGTTAGACCCCCGA | |
| | | GACTACTTACAGACAAGTGGTACTTTCAGTCAGACTTCTGCAACGT | |
| | | TCCGCTTTTCCAGCTACAGTTTGCTCTTGCGGAACTGCGGTTTCCG | |
| | | ATCGGCTCACCACAAACGAACACCACTTGTGTAAACTTCCTGGTGT | |
| | | TAGATAACAGGTACCACTTATTTTTAGATAACAAACCACAACAGTCA | |
| | | GAGAACCTACAAAGAAAAGAGAGGGGGCACGGTTATTCCTTTACG | |
| | | GGTAATGAGGGAGAAGTTGATAGACTAAAATTCTGGCACAGTTTGT | |
| | | GGAATACAGGCAGATTCCTAAACACCACTCACATTAACACCCTACT | |
| | | GCCAAACATCTCTAAATTACAAGAACATAAAGCTGAAGACAGACAG | |
| | | GCAAATGCTAAGTATAAAAATTTAATTAACGGTAACAAAAAGGTATA | |
| | | TAACGATAGTCAATACATGCAAAACGTTTGGGAAGAAAACAAAATA | |
| | | AATACCCTTTATGACGCTATAGCAGAAGAACAATACAGAAAAATAC | |
| | | AAAAGTACTATAACACCACATACGGGCAGTACCAAAGGCAACTATT | |
| | | TACAGGCAAGAAGTACTGGGACTACAGAGTAGGCATGTTCAGTCC | |
| | | CACCTTCCTAAGTCCCAGCAGACTAAATCCAGAGATGCCAGGTGC | |
| | | CTACACAGAGATAGCCTATAACCCCTGGACAGACGAGGGCACGG | |
| | | GCAACGTTGTGTGCCTGCAGTACCTAACAAAAGAAACCTCAGACTA | |
| | | CAAGCCACACGCAGGTAGCAAATTCACCATAGAGGACGTACCCCT | |
| | | GTGGATAGCCATGAACGGGTACGTGGACATATGTAAAAAAGAGGG | |
| | | CAAAGATCCAGGCATAAGACTAAACTGCCTTATGTGTATAAGGTGT | |
| | | CCGTACACCAGGCCCAAACTTTACAACCCCAGATACCCCGAAGAA | |
| | | CTGTTTGTAGTGTACTCTTACAACTTTGCCCACGGGCGCATGCCC | |
| | | GGGGGGGACAAATACATACCCATGGAGTTTAAGGACAGGTGGTAC | |
| | | CCGTCGCTCATGCACCAGGAAGAGGTCATAGAGGACATAGTCAGG | |
| | | AGCGGCCCCTTTGCCCTAAAAGACCAGACAGAGATGGTTACTTGC | |
| | | ATGATGAGGTACTCGGCCCTGTTTAACTGGGGCGGTAATATTATCC | |
| | | GCGAACAGGCCGTGGAAGACCCCTGTAAAAAGAACACCTTTGCCC | |
| | | TTCCCGGAGCCAGTGGAGTCGCTCGCCTACTACAAGTCAGCAACC | |
| | | CGATCAGGCAGACCCCCAGCACCACCTGGCACTCGTGGGACTGG | |
| | | AGAAGGTCCCTCTTTACACAAACGGGTATTAAAAGAATGCGCGAAC | |
| | | AACAACCGTATGATGAAATTACTTATGCAGGGCCTAAGAGGCCAAA | |
| | | ACTCACAGTTCCCGCAGGGCCCACCCTCGCTGCCGGAGACGCCT | |
| | | ACAACTACTGGGAAAGAAAACCGCTCACCTCGCCCGGAGAGACGC | |
| | | TCCCGACCCAGACGGATACAGAGACAGAAGCCCCAGAGGAAGAA | |
| | | GCCCAGCAAGAAGAAGTCCAGGAGGGCCTCCAGCTCCAGCAGCT | |
| | | CTGGGAGCAGCAACTCCAGCAAAAGCGACAGCTGGGAGTCATGTT | |
| | | CCAGCAACTCCTCCGACTCAGAACGGGGGCGGAAATACACCCGG | |
| | | CCCTCGCATAG | |
| ACR20262.1 | FJ392108.1 | ATGGCAGCCTGGTGGTGGGGCAGGCGGAGACGCTGGCGCAGGT | 215 |
| | | GGAGGCGCCGCCGCCTCCCTCGCCGCCGCCGCTGGCGACGGAG | |
| | | GAGACGGTGGCCCAGAAGACGCAGGCGGAGATGGCCGCGCAGA | |
| | | CGCAGACGTCGCAGACCTGCTCGCCGCCCTAGAAGGAGACGCAG | |
| | | ACGCCGAAGGGTAAGGAGACCTCGCCGGCGCCAAAAACTGGTAC | |
| | | TGACTCAGTGGAACCCTCAGACAGTTAGAAAGTGCATTATCAGAG | |
| | | GGTTCGTGCCGCTGTTCCAGTGCAGCAGAACTGCCTACCACAGGA | |
| | | ACTTTGTAGACCACATGGACGACGTGTACACCACGGGTCCCTTCG | |
| | | GGGGCGGCACGGGGTCCATGCTTTTCACCCTGAGCTTCTTCTACC | |
| | | ACGAGTTTAAAAAGCACCACTGCAAGTGGTCCGCCAGCAACAGAG | |
| | | ACTTTGACTTGTGTAGATACAGGGGCACGGTTCTAAAGTTTTATAG | |
| | | ACATCCAGACGTAGACTACATAGTTTGGCTGAACAGAAACCCCCCT | |
| | | TTCCAGGAAGACCTATTAGACGCCATGAGCAGACAGCCCCTCATA | |
| | | ATGTTACAGACTCACAAGTGCATACTGGTGAGGAGCTTTAAAACGC | |
| | | ACCCCAGGGGACCCTCGTACGTCAGAATGAAAGTTAGACCCCCGA | |
| | | GACTACTTACAGACAAGTGGTACTTTCAGTCGGACTTCTGCAACGT | |
| | | TCCGCTTTTCCAGCTACAGTTTGCTCTTGCGGAACTGCGGTTTCCG | |
| | | ATCGGCTCACCACAAACGAACACCACTTGTGTAAACTTCCTGGTGT | |
| | | TAGATAACAGGTACCACTTATTTTTAGATAACAAACCACAACAGTCA | |
| | | GACAACCCACAAAGAAAAGAGAGGGGGCACGGTTATTCCTTTACG | |
| | | GGTAATGAGGGAGAAATGGATAGAGAAAGATTCTGGCACAGTTTG | |
| | | TGGAGTACAGGCAGATTCCTAAACACCACTCACATTAACACCCTAC | |
| | | TGCCAAACATCTCTAAATTACAAGACCATAAAGCTGAAGACAAAGA | |
| | | CGCAAAAACTACCTATAAAAGTTTAATTAACGATAACAAAAAGGTAT | |
| | | ATAACGATAGTCAATACATGCAAAACGTTTGGGACCAAAACAAAAT | |
| | | ACATACCCTTTATATGGCTATAGCAGAAGAACAATACAGAAAAATA | |
| | | CAAAAGTACTATAACACCACATACGGGCAGTACCAAAGGCAACTAT | |
| | | TTACAGGCAAGAAGTACTGGGACTACAGAGTAGGCATGTTCAGTC | |
| | | CCACCTTCCTAAGTCCCAGCAGACTAAATCCAGAGATGCCAGGTG | |
| | | CCTACACAGAGATAGCCTATAACCCCTGGACAGACGAGGGCACGG | |
| | | GCAACGTTGTGTGCCTGCAGTACCTAACAAAAGAAACCTCAGACTA | |
| | | CAAGCCACACGCAGGTAGCAAATTCACCATAGAGGACGTACCCCT | |
| | | GTGGATAGCCATGAACGGGTACGTGGACATATGTAAAAAAGAGGG | |
| | | CAAAGATCCAGGCATAAGACTAAACTGCCTTATGTGTATAAGGTGT | |
| | | CCGTACACCAGGCCCAAACTTTACAACCCCAGATACCCCGAAGAA | |
| | | CTGTTTGTAGTGTACTCTTACAACTTTGCCCACGGGCGCATGCCC | |
| | | GGGGGGGACAAATACATACCCATGGAGTTTAAGGACAGGTGGTAC | |
| | | CCGTCGCTCATGCACCAGGAAGAGGTCATAGAGGACATAGTCAGG | |
| | | AGCAGCCCCTTTGCCCTAAAAGACCAGACAGAGATGGTTACTTGC | |
| | | ATGATGAGGTACTCGGCCCTGTTTAACTGGGGCGGTAATATTATCC | |
| | | GCGAACAGGCCGTGGAAGACCCCTGTAAAAAGAACACCTTTGCCC | |
| | | TTCCCGGAGCCAGTGGAGTCGCTCGCCTACTACAAGTCAGCAACC | |
| | | CGATCAGGCAGACCCCCAGCACCACCTGGCACTCGTGGGACTGG | |
| | | AGAAGGTCCCTCTTTACACAAACGGGTATTAAAAGAATGCGCGAAC | |
| | | AACAACCGTATGATGAAATTACTTATGCAGGGCCTAAGAGGCCAAA | |
| | | ACTCACAGTTCCCGCAGGGCCCACCCTCGCTGCCGGAGACGCCT | |
| | | ACAACTACTGGGAAAGAAAACCGCTCACCTCGCCCGGAGAGACGC | |
| | | TCCCGACCCAGACGGAGACAGAGACAGAAGCCCCAGAGGAAGAA | |
| | | GCCCAGCAAGAAGAAGTCCAGGAGGGCCTCCAGCTCCAGCAGCT | |
| | | CTGGGAGCAGCAACTCCAGCAAAAGCGACAGCTGGGAGTCATGTT | |
| | | CCAGCAACTCCTCCGGCTCAGAACGGGGGCGGAAATACACCCGG | |
| | | CCCTCGCATAG | |
| ACR20267.1 | FJ392111.1 | ATGGCAGCCTGGTGGTGGGGCAGGCGGAGACGCTGGCGCAGGT | 216 |
| | | GGAGGCGCCGCCGCCTCCCTCGCCGCCGCCGCTGGCGACGGAG | |
| | | GAGACGGTGGCCCAGAAGACGCAGGCGGAGATGGCCGCGCAGA | |
| | | CGCAGACGTCGCAGACCTGCTCGCCGCCCTAGAAGGAGACGCAG | |
| | | ACGCCGAAGGGTAAGGAGACCTCGCCGGCGCCAAAAACTGGTAC | |
| | | TGACTCAGTGGAACCCTCAGACAGTTAGAAAGTGCATTATCAGAG | |
| | | GGTTCGTGCCGCTGTTCCAGTGCAGCAGAACTGCCTACCACAGGA | |
| | | ACTTTGTAGACCACATGGACGACGTGTACACCACGGGTCCCTTCG | |
| | | GGGGCGGCGCGGGGTCCATGCTTTTCACCCTGAGCTTCTTCTACC | |
| | | ACGAGTTTAAAAAGCACCACTGCAAGTGGTCCGCCAGCAACAGAG | |
| | | ACTTTGACTTGAGTAGATACAGGGGCGCGGTTCTAAAGTTCTATAG | |
| | | ACATCCAGACGTAGACTACATAGTTTGGCTGAACAGAAACCCCCCT | |
| | | TTCCAGGAAAACCTATTAGACGCCATGAGCAGACAGCCCCTCATA | |
| | | ATGTTACAGACTCACAAGTGCATACTGGTGAGGAGCTTTAAAACGC | |
| | | ACCCCAGGGGACCCTCGTACGTCAGAATGAAAGTTAGACCCCCGA | |
| | | GACTACTTACAGACAAGTGGTACTTTCAGTCAGACTTCTGCAACGT | |
| | | TCCGCTTTTCCAGCTACAGTTTGCTCTTGCGGAACTGCGGTTTCCG | |
| | | ATCGGCTCACCACAAACGAACACCACTTGTGTAAACTTCCTGGTGT | |
| | | TAGACAACAGGTACCACTCATTTTTAGATAACAAACCACAACAGTC | |
| | | AGAGAACTCACAAAGAAAAGAGAGGGGGCACGGTTATTCCTTTAC | |
| | | GGGTAAAGAGGGAGAACAGGATAGACTAACATTCTGGCAGAGTTT | |
| | | GTGGAATACAGGCAGATTCCTAAACACCACTCACATTAACACCCTA | |
| | | CTGCCAAACATCTCTAAATTACAAGACCATAAAGCTGAAGACACAG | |
| | | ACGCAAATCCTGACTATAAAAGTTTAATTAACGGTAACAAAAAGGT | |
| | | ATATAACGATAGTCAATACATGCAAAACGTTTGGCAACAAGGCAAA | |
| | | ATAAATACCCTTTGTAACGCTATAGCACAGGAACAATACAGAAAAA | |
| | | TACAAAAGTACTATAACACCACATACGGGCAGTACCAAAGGCAACT | |
| | | ATTTACAGGCAAGAAATACTGGGACTACAGAGTAGGCACGTTCAG | |
| | | TCCCACCTTCCTAAGTCCCAGCAGACTAAATCCAGAGATGCCAGG | |
| | | TGCCTACACAGAGATAGCCTATAACCCCTGGACAGACGAGGGCAC | |
| | | GGGCAACGTTGTGTGCCTGCAGTACCTAACAAAAGAAACCTCAGA | |
| | | CTACAAGCCACACGCAGGTAGCAAATTCACCATAGAGGACGTACC | |
| | | CCTGTGGATAGCCATGAACGGGTACGTGGACATATGTAAAAAAGA | |
| | | GGGCAAAGATCCAGGCATAAGACTAAACTGCCTTATGTGTATAAG | |
| | | GTGTCCGTACACCAGGCCCAAACTTTACAACCCCAGATACCCCGA | |
| | | AGAACTGTTTGTAGTGTACTCTTACAACTTTAGCCACGGGCGCATG | |
| | | CCCGGGGGGGACAAATACATACCCATGGAGTTTAAGGACAGGTG | |
| | | GTACCCGTCGCTCATGCACCAGGAAGAGGTCATAGAGGACATAGT | |
| | | CAGGAGCGGCCCCTTTGCCCTAAAAGACCAGACAGACATGGTTAC | |
| | | TTGCATGATGAGGTACTCGGCCCTGTTTAACTGGGGCGGTAATATT | |
| | | ATCCGCGAACAGGCCGTGGAAGACCCCTGTAAAAAGAACACCTTT | |
| | | GCCCTTCCCGGAGCCAGTGGAGTCGCTCGCCTACTACAAGTCAGC | |
| | | AACCCGATCAGGCAGACCCCCAGCACCACCTGGCACTCGTGGGA | |
| | | CTGGAGAAGGTCCCTCTTTACACAAACGGGTATTAAAAGAATGCG | |
| | | CGAACAACAACCGTATGATGAAATTACTTATGCAGGGCCTAAGAG | |
| | | GCCAAAACTCACAGTTCCCGCAGGGCCCACCCTCGCTGCCGGAG | |
| | | ACGCCTACAACTACTGGGAAAGAAAACCGCTCACCTCGCCCGGAG | |
| | | AGACGCTCCCGACCCAGACGGAGACAGAGACAGAAGCCCCAGAG | |
| | | GAAGAAGCCCAGCAAGAAGAAGTCCAGGAGGGCCTCCAGCTCCA | |
| | | GCAGCTATGGGAGCAGCAACTCCAGCAAAAGCGACAGCTGGGAG | |
| | | TCATGTTCCAGCAACTCCTCCGACTCAGAACGGGGGCGGAAATAC | |
| | | ACCCGGCCCTCGCATAG | |
| ACR20269.1 | FJ392112.1 | ATGGCAGCCTGGTGGTGGGGCAGGCGGAGACGCTGGCGCAGGT | 217 |
| | | GGAGGCGCCGCCGCCTCCCTCGCCGCCGCCGCTGGCGACGGAG | |
| | | GAGACGGTGGCCCAGAAGACGCAGGCGGAGATGGCCGCGCAGA | |
| | | CGCAGACGTCGCAGACCTGCTCGCCGCCCTAGAAGGAGACGCAG | |
| | | ACGCCGAAGGGTAAGGAGACCTCGCCGGCGCCAAAAACTGGTAC | |
| | | TGACTCAGTGGAACCCTCAGACAGTTAGAAAGTGCATTATCAGAG | |
| | | GGTTCGTGCCGCTGTTCCAGTGCAGCAGAACTGCCTACCACAGGA | |
| | | ACTTTGTAGACCACATGGACGACGTGTACACCACGGGTCCCTTCG | |
| | | GGGGCGGCACGGGGTCCATGCTTTTCACCCTGAGCTTCTTCTACC | |
| | | ACGAGTTTAAAAAGCACCACTGCAAGTGGTCCGCCAGCAACAGAG | |
| | | ACTTTGACTTGTGTAGATACAGGGGCACGGTTCTAAAGTTTTATAG | |
| | | ACATCCAGACGTAGACTACATAGTTTGGCTGAACAGAAACCCCCCT | |
| | | TTCCAGGAAAACCTATTAGACGCCATGAGCAGACAGCCCCTCATA | |
| | | ATGTTACAGACTCACAAGTGCATACTGGTGAGGAGCTTTAAAACGC | |
| | | ACCCCAGGGGACCCTCGTACGTCAGAATGAAAGTTAGACCCCCGA | |
| | | GACTACTTACAGACAAGTGGTACTTTCAGTCAGACTTCTGCAACGT | |
| | | TCCGCTTTTCCAGCTACAGTTTGCTCTTGCGGAACTGCGGTTTCCG | |
| | | ATCGGCTCACCACAAACGAACACCACTTGTGTAAACTTCCTGGTGT | |
| | | TAGATAACAGGTACCACTTATTTTTAGATAACAAACCACGACAGTC | |
| | | AGAGAACTTACAAAGAAAAGAGAGGGGGCACGGTTATGTCTTTAC | |
| | | GGGTAATGAGGGAGAAGATGATAGACTAAAATTCTGGCACAGTTT | |
| | | GTGGAGTACAGGCAGATTCCTAAACACCACTCACATTAACACCCTA | |
| | | CTGCCAAACATCTCTAAATTACAAGACCATGAAGCTGAAGACACAC | |
| | | AGGCAAAAACTGACTATAAAAGTTTAATTAACGGTAACAAAAAGGT | |
| | | ATATAACGATAGTCAATACATGCAAGACGTTTGGGAACAAAAGAAA | |
| | | ATACAAACCCTTTATAAGGTTATAGCAGAAGAACAATACAGAAAAA | |
| | | TAGAAAAGTACTATAACACCACATACGGGCAGTACCAAAGGCAACT | |
| | | ATTTACAGGCAAGAAGTACTGGGACTACAGAGTAGGCATGTTCAG | |
| | | TCCCACCTTCCTAAGTCCCAGCAGACTAAATCCAGAGATGCCAGG | |
| | | TGCCTACACAGAGATAGCCTATAACCCCTGGACAGACGAGGGCAC | |
| | | GGGCAACGTTGTGTGCCTGCAGTACCTAACAAAAGAAACCTCAGA | |
| | | CTACAAGCCACACGCAGGTAGCAAATTCACCATAGAGGACGTACC | |
| | | CCTGTGGATAGCCATGAACGGGTACGTGGACATATGTAAAAAAGA | |
| | | GGGCAAAGATCCAGGCATAAGACTAAACTGCCTTATGTGTATAAG | |
| | | GTGTCCGTACACCAGGCCCAAACTTTACAACCCCAGATACCCCGA | |
| | | AGAACTGTTTGTAGTGTACTCTTACAACTTTGCCCACGGGCGCATG | |
| | | CCCGGGGGGGACAAATACATACCCATGGAGTTTAAGGACAGGTG | |
| | | GTACCCGTCGCTCATGCACCAGGAAGAGGTCATAGAGGACATAGT | |
| | | CAGGAGCGGCCCCTTTGCCCTAAAAGACCAGACAGAGATGGTTAC | |
| | | TTGCATGATGAGGTACTCGGCCCTGTTTAACTGGGGCGGTAATATT | |
| | | ATCCGCGAACAGGCCGTGGAAGACCCCTGTAAAAAGAACACCTTT | |
| | | GCCCTTCCCGGAGCCAGTGGAGTCGCTCGCCTACTACAAGTCAGC | |
| | | AACCCGATCAGGCAGACCCCCAGCACCACCTGGCACTCGTGGGA | |
| | | CTGGAGAAGGTCCCTCTTTACACAAACGGGTATTAAAAGAATGCG | |
| | | CGAACAACAACCGTATGATGAAATTACTTATGCAGGGCCTAAGAG | |
| | | GCCAAAACTCACAGTTCCCGCAGGGCCCACCCTCGCTGCCGGAG | |
| | | ACGCCTACAACTACTGGGAAAGAAAACCGCTCACCTCGCCCGGAG | |
| | | AGACGCTCCCGACCCAGACGGAGACAGAGACAGAAGCCCCAGAG | |
| | | GAAGAAGCCCAGCAAGAAGAAGTCCAGGAGGGCCTCCAGCTCCA | |
| | | GCAGCTCTGGGAGCAGCAACTCCAGCAAAAGCGACAGCTGGGAG | |
| | | TCATGTTCCAGCAACTCCTCCGACTCAGAACGGGGGCGGAAATAC | |
| | | ACCCGGCCCTCGCATAG | |
| ACR20272.1 | FJ392114.1 | ATGGCTGCCTGGTGGTGGGGCAGGAGGCGGCGATGGCGCCGGT | 218 |
| | | GGAGACGGCGCCGTCTCCCTCGCCGCCGCCGCTGGCGACGGAG | |
| | | GAGACGGTGGCCCAGGAGGCGTAGGCGGAGATGGCCGCGGAGA | |
| | | CGCAGACGTCGCGGACCTGCTCGCCGCCTTAGAAGGAGACGTCG | |
| | | ACGCAGAAGGGTAAGGAGACCTCGCCGGCGCCAAAAACTCGTAC | |
| | | TGACTCAGTGGAACCCCCAGACCCAGAGAAAGTGCGTGGTCAGG | |
| | | GGGTTTCTGCCCCTGTTCTTTTGCGGACAGGGAGCCTATCACAGA | |
| | | AACTTTGTGGAACACATGGACGACGTGTTCCCCAAGGGACCCTCG | |
| | | GGAGGGGGCTTTGGCAGCATGGTGTGGAACCTAGATTTTTTGTAC | |
| | | CAAGAGTTTAAAAAGCATCACAACAAGTGGTCTTCCAGCAACAGG | |
| | | GACTTTGACCTAGTGAGGTGCCACGGCACGGTGATTAAATTCTAC | |
| | | AGACACTCTGACTTTGACTACCTGGTGCACGTCACCAGGACCCCT | |
| | | CCTTTCAAGGAGGACCTCCTCACCATCGTCAGCCACCAGCCGGGG | |
| | | CTCATGATGCAGAACTACAGGTGCATACTCGTAAAGAGTTACAAGA | |
| | | CGCACCCCGGGGGGCGACCCTACATAACACCTAAAATAAGGCCC | |
| | | CCCAGACTCCTGACGGACAAGTGGTACTTTCGGCCCGACTTCTGC | |
| | | GGAGTTCCTCTTTTCAAACTGTACGTTACTCTTGCAGAGTTGCGGT | |
| | | TTCCGATCTGCTCACCACAAACTGACACCAATTGTGTCACCTTCCT | |
| | | GGTGTTAGACAACACCTACTACGACTACTTAGACAATACTGCAGAC | |
| | | ACCACTAGAGACCATGAAAGACAGCAGAAATGGACAAACATGAAA | |
| | | ATGACACCCAGATACCATCTCACCAGTCACATAAATACATTGTTTA | |
| | | GTGGAACACAACAGATGCAAAGCGCAAAAGAAACAGGCAAAGACA | |
| | | GTCAGTTTAGAGAAAACATCTGGAAAACAGCTGAGGTTGTTAAAAT | |
| | | TATTAAAGATATAGCCTCAAAAAACATGCAAAAACAACAAACCTACT | |
| | | ACACAAAAACCTATGGCGCCTATGCCACCCAGTATTTTACTGGAAA | |
| | | ACAATACTGGGACTGGAGGGTGGGCCTGTTCAGCCCCATATTCCT | |
| | | CAGTCCCAGCAGACTGAACCCACAAGAGCCAGGGGCCTACACAG | |
| | | AAATAGCTTACAATCCATGGACTGACGAGGGCACGGGCAACATAG | |
| | | TGTGCATTCAGTACCTAACAAAGAAAGACAGTCACTACAAGCCGG | |
| | | GTGCCGGTAGCAAATTCGCAGTGACGGACGTTCCCCTGTGGGCC | |
| | | GCCCTGTTCGGGTACTACGACCAGTGTAAGAAAGAAAGCAAAGAC | |
| | | GCGAACATAAGACTAAACCGCTTGCTGTTAGTCAGGTGCCCTTACA | |
| | | CCAGGCCTAAACTGTACAATCCCAGAGACCCGGACCAACTGTTTG | |
| | | TAATGTACAGCTACAACTTTGGGCACGGACGCATGCCGGGGGGC | |
| | | GACAAGTACGTGCCCATGGAATTTAAGGACAGGTGGTACCCGTGC | |
| | | ATGCTGCACCAAGAAGAAGTAGTGGAGGAGATAGTAAGGTGCGG | |
| | | GCCCTTTGCTCCCAAAGACATGACTCCCTCGGTAACATGCATGGC | |
| | | CAGATACTCATCCCTGTTCACCTGGGGGGGCAATATCATTCGCGA | |
| | | ACAGGCCGTGGAGGACCCCTGTAAAAAATCCACGTTTGCCATTCC | |
| | | CGGAGCCGGTGGACTCGCTCGCATTCTACAAGTCAGCAACCCGCA | |
| | | GAGGCAAGCCCCCACCACCACCTGGCACTCGTGGGGCTGGCGCC | |
| | | GATCCCTCTTTACAGAGACGGGTCTTAAGCGAATGCAGGAACAAC | |
| | | AACCTTACGATGAAATGTCCTATACAGGCCCTAAAAGGCCAAAACT | |
| | | GTCTGTTCCCCCAGCAGCAGAAGGAAACCTCGCTGCAGGAGGAG | |
| | | GCTTATTCTTCAGGGACGGAAAACAGCCTGCCTCGCCAGGAGGCA | |
| | | GTCTCCCGACGCAGTCGGAGACAGAAGCAGAAGCCGAAGACGAA | |
| | | GAAGCCCACCAAGAAGAGACGGAGGAGGGAGCGCAGCTCCAGCA | |
| | | GCTCTGGGAGCAGCAACTCCAACAGAAGCGAGAGCTGGGAATCG | |
| | | TTTTCCAACACCTCCTCCGACTCCGACAGGGGGCGGAAATCCACC | |
| | | CGGGCCTCGTATAA | |
| ACR20274.1 | FJ392115.1 | ATGGCTGCYTGGTGGTGGGGCAGGAGGCGGCGATGGCGCCGGT | 219 |
| | | GGAGACGGCGCCGTYTCCCTCGCCGCCGCCGCTGGCGACGGAG | |
| | | GAGACGGTGGCCCAGGAGGCGTAGGCGGAGATGGCCGCGGAGA | |
| | | CGCAGACGTCGCAGACCTGCTCGCCGCCTTAGAAGGAGACGTCG | |
| | | ACGCAGAAGGGTAAGGAGACCTCGCCGGCGCCAAAAACTCGTAC | |
| | | TGACTCAGTGGAACCCCCAGACCCAGAGAAAGTGCGTGGTCAGG | |
| | | GGGTTTCTGCCCCTGTTCTTCTGCGGACAGGGAGCCTATCACAGA | |
| | | AACTTTGTGGAACACATGGACGACGTGTTCCCCAAGGGACCCTCG | |
| | | GGAGGGGGCTTTGGCAGCATGGTGTGGAACCTAGATTTTTTGTAC | |
| | | CAAGAGTTTAAAAAGCATCACAACAGGTGGTCTTCCAGCAACAGG | |
| | | GACTTTGACCTAGTGAGGTACCACGGCACGGTGATTAAATTCTACA | |
| | | GACACTCTGACTTTGACTACCTGGTGCACGTCACCAGGACCCCTC | |
| | | CTTTCAAGGAGGACCTCCTCACCATCGTCAGCCACCAGCCGGGGC | |
| | | TCATGATGCAGAACTACAGGTGCATACTCGTAAAGAGTTACAAGAC | |
| | | GCACCCCGGGGGGCGACCCTACATAACACTTAAAATAAGGCCCCC | |
| | | CAGACTCCTGACGGACAAGTGGTACTTTCAGCCCGACTTCTGCGG | |
| | | AGTTCCTCTTTTCAAACTGTACGTTACTCTTGCAGAGTTGCGGTTT | |
| | | CCGATCTGCTCACCACAAACTGACACCAATTGTGTCACCTTCCTGG | |
| | | TGTTAGACAACACCTACTACGACTACTTAGACAGTACTGCAGACAC | |
| | | CACTAGAGACAATGAAAGACACCAGAAATGGAAAAACATGATAATG | |
| | | ACACCCAGATACCATCTCACCAGTCACATAAATACATTGTTTAGTG | |
| | | GAACACAACAGATGCAAAACGCAAAAGAAACAGGCAAAGACAGTC | |
| | | AGTTTAGAGAAAACATCTGGAAAACAGAAGAGGTTGTTAAAATTAT | |
| | | TCACGATATAGCCTCTAGAAACATGCAAAAACAAATAACCTACTAC | |
| | | ACAAAAACCTATGGCGCCTATGCCACCCAGTATTTTACTGGAAAAC | |
| | | AATACTGGGACTGGAGGGTGGGCCTGTTCAGCCCCATATTCCTCA | |
| | | GTCCCAGCAGACTGAACCCACAAGAGCCAGGGGCCTACACAGAA | |
| | | ATAGCTTACAATCCATGGACTGACGAGGGCACGGGCAACATAGTG | |
| | | TGCATTCAGTACCTAACAAAGAAAGACAGTCACTACAAGCCGGGT | |
| | | GCCGGTAGCAAATTCGCAGTGACGGACGTTCCCCTGTGGGCCGC | |
| | | CCTGTTCGGGTACTACGACCAGTGTAAGAAAGAAAGCAAAGACGC | |
| | | GAACATAAGACTAAACTGCTTGCTGTTAGTCAGGTGCCCTTACACC | |
| | | AGGCCTAAACTGTACAATCCCAGAGACCCGGACCAACTGTTTGTA | |
| | | ATGTACAGCTACAACTTTGGGCACGGACGCATGCCGGGGGGCGA | |
| | | CAAGTACGTGCCCATGGAATTTAAGGACAGGTGGTACCCGTGCAT | |
| | | GCTGCACCAAGAAGAAGTAGTGGAGGAGATAGTAAGGTGCGGGC | |
| | | CCTTTGCTCCCAAAGACATGACTCCCTCGGTAACATGCATGGCCA | |
| | | GATACTCATCCCTGTTCACCTGGGGGGGCAATATCATTCGCGAAC | |
| | | AGGCCGTGGAGGACCCCTGTAAAAAATCCACGTTTGCCATTCCCG | |
| | | GAGCCGGTGGACTCGCTCGCATTCTACAAGTCAGCAACCCGCAGA | |
| | | GGCAAGCCCCCACGACCACGTGGCACTTGTGGGACTGGCGCCGA | |
| | | TCCCTCTTTACAGAGACGGGTCTTAAGCGAATGCAGGAACAACAA | |
| | | CCTTACGATGAAATGTCTTATACAGGCCCTAAAAGGCCAAAACTGT | |
| | | CCGTTCCCCCAGCAGCAGAAGGAAACCTCGCTGCAGGAGGAGGC | |
| | | TTATTCTTCCGGGACAGAAAACAGCCCACCTCGCCAGGAGGCAGT | |
| | | CTCCCGACGCAGTCGGAGACAGAAGCAGAAGCGGAAGACGAAGA | |
| | | AGCCCACCAAGAAGAGACGGAGGAGGGAGCGCAGCTCCAGCAGC | |
| | | TCTGGGAGCAGCAACTCCAACAGAAGCGAGAGCTGGGAATCGTTT | |
| | | TCCAACACCTCCTCCGACTCCGACAGGGGGCGGAAATCCACCCG | |
| | | GGCCTCGTATAA | |
| ACR20277.1 | FJ392117.1 | ATGGCATGGTGGTGGTGGAGAAGGAGACGCCGCCCGTGGAGAAG | 220 |
| | | GCGCTGGCGCTGGAAGAGACGAGCCCGAGTACGAACCAGGAGAC | |
| | | CTAGACGCGCTGTTCGCCGCCGTCGAAGAAGAGTAAGGAGGCGG | |
| | | AGGAGGGGGTGGAGGAGACTATACAGACGATGGCGACGAAAGGG | |
| | | CAGACGCAGACGCAGACGCAAAAAGTTAGTAATGAAACAGTGGAA | |
| | | CCCCTCCACTGTCAGCAGATGCTATATTGTTGGATACCTGCCTATT | |
| | | ATTATTATGGGACAGGGGACTGCATCCATGAACTATGCATCTCACT | |
| | | CAGACGACGTGTACTACCCCGGACCGTTTGGGGGGGGAATAAGC | |
| | | TCTATGAGGTTTACTTTAAGAATACTGTATGACCAGTTTATGAGAG | |
| | | GACAGAACTTCTGGACTAAGACAAACGAGGACTTGGACCTAGCTA | |
| | | GATTTCTAGGCAGCAAATGGAGGTTCTATAGACACAAAGATGTGGA | |
| | | CTTTATAGTGACTTACGAGACCTCAGCCCCCTTTACAGACTCCCTA | |
| | | GAGTCAGGACCACACCAACACCCAGGCATACAGATGCTAATGAAA | |
| | | AACAAAATACTAATCCCTAGCTTTGCCACCAAACCAAAAGGAAGGT | |
| | | CTAGCATTAAAGTTAGAATACAGCCCCCAAAGCTAATGATAGACAA | |
| | | GTGGTACCCACAAACTGACTTCTGTGAAGTAACGCTGCTAACCATA | |
| | | CATGCAACCGCCTGCAACTTGCGGTTTCCGTTCTGCTCACCACAA | |
| | | ACTGACACTTCCTGTGTTCAGTTTCAAGTGTTGTCATACAACGCTT | |
| | | ACAGGCAGAGAATTTCAATACTTCCTGAATTATGTACTAGAGAAAA | |
| | | GCTTAGGGAGTTTATTAAACAAGTAGTAAAACCAAATTTAACATGCA | |
| | | TAAACACTCTAGCTACTCCATGGTGCTTTAAATTCCCAGAGCTAGA | |
| | | CAAACTACCACCAGTGGCAAACAATGCAACAGGCTGGTCAGTTAA | |
| | | CCCAGATAGCGGAGACGGAGATGTAATATACCAGGAAACTACATT | |
| | | AGAAACCAAATGGATTGCTAACAATGATGTGTGGCATACAAAAGAC | |
| | | CAAAGAGCACACAACAACATACATAGCCAATATGGCATGCCACAAT | |
| | | CAGACGCATTAGAACACAAAACAGGTTACTTCAGTCCAGCATTATT | |
| | | AAGCCCACAAAGACTAAACCCACAGATACCAGGCCTATACATAAAC | |
| | | ATAGTCTACAATCCACTAACAGACAAAGGAGAAGGCAACAAAATTT | |
| | | GGTGTGACCCACTAACAAAAAACACATTTGGCTATGATCCCCCTAA | |
| | | AAGTAAATTCCTTATAGAAAATCTGCCACTGTGGTCTGCAGTAACA | |
| | | GGATACGTAGACTACTGCACGAAAGCCAGCAAAGATGAAAGCTTT | |
| | | AAATACAACTACAGAGTACTTATCCAGACCCCATACACAGTACCAG | |
| | | CACTATACAGTGACTCTGAAACCACCAAAAACAGAGGCTACATTCC | |
| | | CATAGGCACAGACTTTGCATACGGCCGCATGCCTGGGGGAGTACA | |
| | | ACAAATACCAATTAGATGGAGAATGAGGTGGTACCCCATGCTATTT | |
| | | AATCAACAACCAGTACTAGAAGACCTATTCCAGTCAGGCCCCTTTG | |
| | | CATACCAAGGAGATGCTAAATCAGCCACACTAGTCGGCAAATATG | |
| | | CCTTTAAATGGCTATGGGGTGGCAATCGTATCTTCCAACAGGTGGT | |
| | | CAGAGACCCGCGCTCACACCAGCAAGACCAATCAGTTGGTCCCAG | |
| | | TAGACAGCCTAGAGCAGTACAAGTCTTTGACCCGAAGTACCAAGC | |
| | | ACCACAATGGACATTCCACGCGTGGGACATCAGACGTGGTCTGTT | |
| | | TGGCAGACAGGCTATTAAAAGAGTGTCAGCAAAACCAACACCTGA | |
| | | TGAGCTTATATCAACAGGCCCAAAAAGACCTCGGCTGGAAGTCCC | |
| | | CGCGTTCCAAGAAGAGCAAGAAAAAGACTTACTTTTCAGACAGAGA | |
| | | AAACACAAAGCCTGGGAGGACACAACGGAGGAAGAGACAGAAGC | |
| | | CCCCTCAGAAGAGGAGGAAGAGAACCAAGAGCTCCAGCTCGTCA | |
| | | GACGCCTCCAGCAGCAACGAGAGCTGGGACGAGGCCTCAGATGC | |
| | | CTCTTCCAGCAACTAACCCGCACACAGATGGGGCTGCATGTAGAC | |
| | | CCCCAACTATTGGCCCCTGTATAA | |
| AD051761.1 | GU797360.1 | ATGGCATGGGGATGGTGGAAACGAAGGCGCAAGTGGTGGTGGAG | 221 |
| | | ACGACGCTGGACTCGTGGCCGACTTCGCAAACGACGGGCTAGAC | |
| | | GAGCTGGTCGCCGCCCTCGACGAAGAAGAGTAAGGAGACGGAGG | |
| | | GCTTGGAGGCGTGGGCGACGAAAGAGACGGACTTTCAGACGCAG | |
| | | ACGCAGACGAAAGGGTAGGAGACACAGAACCAGACTTATAATAAG | |
| | | ACAATGGCAGCCAGAAATAGTGAGAAAGTGCCTCATAATAGGCTA | |
| | | CTTTCCCATGATTATATGTGGCCAGGGACGCTGGTCAGAGAACTA | |
| | | CAGCAGCCACCTAGAGGACCGTGTAGTAAAACAGGCCTTCGGTGG | |
| | | GGGACACGCGACTACCAGGTGGTCTCTAAAAGTACTGTACGAGGA | |
| | | GAACCTCAGACACTTGAACTTTTGGACCTGGACTAACAGAGACTTA | |
| | | GAACTGGCCAGGTACCTCAAAGTGACGTGGACCTTTTACAGACAC | |
| | | CAAGATGTAGACTTTATAATATACTTTAACAGAAAGAGCCCCATGG | |
| | | GAGGCAACATATACACAGCACCCATGATGCATCCGGGAGCCCTAA | |
| | | TGCTCAGCAAACACAAGATACTAGTAAAAAGCTTTAAAACAAAACC | |
| | | CAAGGGCAAAGCAACAGTTAAAGTGACTATTAAGCCCCCCACTCTA | |
| | | CTAGTAGACAAGTGGTACTTTCAAAAGGACATTTGCGACATGACAC | |
| | | TGTTAAACCTCAATGCCGTTGCGGCTGACTTGCGGTTTCCGTTCTG | |
| | | CTCACCACAAACTGACAACCCTTGCATCAACTTCCAGGTTCTGTCC | |
| | | TCAGTGTATAACAACTTCCTCTCTATAACTGACAATAGACTAACACC | |
| | | AGTCACAGATGATGGCCAGGCTTATTATAAAGCTTTTCTAGACGCT | |
| | | GCATTTACCAAAGACAGAGACTTTAATGCTGTTAATACGTTTAGAA | |
| | | CAATATCTAACTTTTCCCACCCACAACTAGAACTTCCAACTAAAACC | |
| | | ACCAACACATCCCAAGATCAATACTTTAACACTCTAGATGGGTACT | |
| | | GGGGAGACCCCATATATGTACACACACAAAATATAAAACCTGACCA | |
| | | AAACCTTGATAAATGCAAAGAAATACTTACAAACAACATGAAAAACT | |
| | | GGCATAAAAAAGTAAAGTCAGAAAACCCAAGTAGCCTGAACCACA | |
| | | GCTGCTTTGCCCACAATGTAGGCATATTCAGCAGCTCATTCCTATC | |
| | | CGCAGGCAGACTAGCACCAGAAGTTCCAGGCCTGTACACAGATGT | |
| | | TATTTACAACCCATACACAGACAAGGGAAAGGGAAACATGCTATGG | |
| | | GTGGATTACTGTAGCAAAGGAGACAACCTATACAAAGAAGGCCAA | |
| | | AGCAAGTGTCTACTTGCCAACCTACCCCTCTGGATGGCCACAAAC | |
| | | GGTTATATAGACTGGGTAAAAAAAGAAACAGATAACTGGGTTATAA | |
| | | ACACTCAAGCCAGAGTACTCATGGTATGTCCCTACACTTACCCAAA | |
| | | ACTATACCATGAAATACAGCCATTATATGGCTTTGTAGTATACTCAT | |
| | | ATAACTTTGGAGAGGGAAAAATGCCAAACGGGGCCACATACATAC | |
| | | CCTTTAAGTTTAGAAACAAGTGGTATCCAACCATATACATGCAGCA | |
| | | AGCAGTACTAGAAGATATATCCAGATCGGGCCCCTTTGCACTTAAA | |
| | | CAACAGATACCCAGCGCCACACTTACTGCCAAATACAAATTCAAAT | |
| | | TCTTATTTGGCGGTAACCCTACTTCTGAACAGGTTGTTAGAGACCC | |
| | | CTGCACTCAGCCCACCTTCGAACTGCCCGGAGCCAGTACGCAGC | |
| | | CTCCACGAATACAAGTCACGGACCCGAAACTCCTCGGTCCCCACT | |
| | | ACTCATTCCACTCGTGGGACCTCAGACGTGGCTACTATAGCACAA | |
| | | AGAGTATTAAACGAATGTCAGAACACGAAGAACCTTCTGAGTTTAT | |
| | | TTTCCCAGGTCCCAAAAAACCCAGGGTCGACCTCGGGCCAATCCA | |
| | | ACAGCAAGAAAGGCCCTCCGATTCACTCCAAAGAGAATCGAGGCC | |
| | | GTGGGAGACCAGCGAAGAAGAGAGCGAAGCAGAAGTCCAGCAAG | |
| | | AAGAGACGGAGGAGGTGCCCCTCAGACAGCAACTCCTCCACAAC | |
| | | CTCAGAGAGCAGCAGCAACTCCGAAAGGGCCTCCAGTGCGTCTTC | |
| | | CAGCAGCTAATAAAGACGCAGCAGGGGGTTCACATAGACCCATCC | |
| | | CTACTGTAG | |
| AAX94182.1 | DQ003341.1 | ATGGCGTGGTCGTGGTGGTGGAGGCGACGGAAACGCTGGTGGCC | 222 |
| | | GCGCAGAAGGAGGCGATGGAGGAGATTTCGCACCCGAAGAGCTA | |
| | | GACGAGCTGTTCCGCGCCGTCGCCGCCGACGAAGAGTAAGGAGG | |
| | | CGCCGGTGGGGGAGGCGAGGACGTAGGAGACGGGTTTTTTATAA | |
| | | GAGACGCAGACGAAAGACTGGCAGACTGTACAGAAAGCCCAAAAA | |
| | | GAAACTAGTACTGACTCAGTGGCACCCCACTACCGTCCGCAACTG | |
| | | CTCCATCCGAGGCCTTGTGCCTCTAGTACTCTGCGGACACACTCA | |
| | | GGGCGGCAGAAACTTTGCTCTCAGGAGCGATGACTACCCCAAGCA | |
| | | GGGGTCTCCTTACGGAGGCAGTTTTAGCACTACAACCTGGAACTT | |
| | | GAGGGTCCTTTTTGACGAACACCAAAAACACCACAACACGTGGAG | |
| | | CTACCCCAATAACCAGCTAGACCTGGGCAGATACAAGGGCTGCAC | |
| | | CTTCTGCTTTTACAGAGGCAAAAAGACGGACTACATAGTAAAGTTT | |
| | | CAGAGGAGGGGACCCTTTAAAATAAACAAGTACAGCAGTCCCATG | |
| | | GCCCATCCGGGCATGATGATGCTAGATAAGATGAAAATCCTGGTG | |
| | | CCCAGCTTTGATACCAGGCCCGGGGGTCGCTGA | |
| AAX94185.1 | DQ003342.1 | ATGGCGTGGTCGTGGTGGTGGAGGCGACGGAAACGCTGGTGGCC | 223 |
| | | GCGCAGAAGGAGGCGATGGAGGAGATTTCGCACCCGAAGAGCTA | |
| | | GACGAGCTGTTCCGCGCCGTCGCCGCCGACGAAGAGTAAGGAGG | |
| | | CGCCGGTGGGGGAGGCGAGGACGTAGGAGACGGGTTTTTTATAA | |
| | | GAGACGCAGACGAAAGACTGGCAGACTGTACAGAAAGCCCAAAAA | |
| | | GAAACTAGTACTGACTCAGTGGCACCCCACTACCGTCCGCAACTG | |
| | | CTCCATCCGAGGCCTTGTGCCTCTAGTACTCTGCGGACACACTCA | |
| | | GGGCGGCAGAAACTTTGCTCTCAGGAGCGATGACTACCCCAAGCA | |
| | | GGGGTCTCCTTACGGAGGCAGTTTTAGCACTACAACCTGGAACTT | |
| | | GAGGGTCCTTTTTGACGAACACCAAAAACACCACAACACGTGGAG | |
| | | CTACCCCAATAACCAGCTAGACCTGGGCAGATACAAGGGCTGCAC | |
| | | CTTCTGCTTTTACAGAGGCAAAAAGACGGACTACATAGTAAAGTTT | |
| | | CAGAGGAGGGGACCCTTTAAAATAAACAAGTACAGCAGTCCCATG | |
| | | GCCCATCCGGGCATGATGATGCTAGATAAGATGAAAATCCTGGTG | |
| | | CCCAGCTTTGATACCAGGCCCGGGGGTCGCTGA | |
| AAX94188.1 | DQ003343.1 | ATGGCGTGGTCGTGGTGGTGGAGGCGACGGAAACGCTGGTGGCC | 224 |
| | | GCGCAGAAGGAGGCGATGGAGGAGATTTCGCACCCGAAGAGCTA | |
| | | GACGAGCTGTTCCGCGCCGTCGCCGCCGACGAAGAGTAAGGAGG | |
| | | CGCCGGTGGGGGAGGCGAAGACGTAGGAGACGGGTTTTTTATAA | |
| | | GAGACGCAGACGAAAGACTGGCAGACTGTACAGAAAGCCCAAAAA | |
| | | GAAACTAGTACTGACTCAGTGGCACCCCACTACCGTCCGCAACTG | |
| | | CTCCATCCGAGGCCTTGTGCCTCTAGTACTCTGCGGACACACTCA | |
| | | GGGCGGCAGAAACTTTGCTCTCAGGAGCGATGACTACCCCAAGCA | |
| | | GGGGTCTCCTTACGGAGGCAGTTTTAGCACTACAACCTGGAACTT | |
| | | GAGGGTCCTTTTTGACGAACACCAAAAACACCACAACACGTGGAG | |
| | | CTACCCCAATAACCAGCTAGACCTGGGCAGATACAAGGGCTGCAC | |
| | | CTTCTACTTTTACAGAGACAAAAAGACAGACTACATAGTAAAGTTTC | |
| | | AGAGGAGGGGACCCTTTAAAATAAACAAGTACAGCAGTCCCATGG | |
| | | CCCATCCGGGCATGATGATGCTAGATAAGATGAAAATCCTGGTGC | |
| | | CCAGCTTTGATACCAGGCCCGGGGGTCGCTGA | |
| AAX94191.1 | DQ003344.1 | ATGGCGTGGTCGTGGTGGTGGAGGCGACGGAAACGCTGGTGGCC | 225 |
| | | GCGCAGAAGGAGGCGATGGAGGAGATTTCGCACCCGAAGAGCTA | |
| | | GACGAGCTGTTCCGCGCCGTCGCCGCCGACGAAGAGTAAGGAGG | |
| | | CGCCGGTGGGGGAGGCGAAGACGTAGGAGACGGGTTTTTTATAA | |
| | | GAGACGCAGACGAAAGACTGGCAGACTGTACAGAAAGCCCAAAAA | |
| | | GAAACTAGTACTGACTCAGTGGCACCCCACTACCGTCCGCAACTG | |
| | | CTCCATCCGAGGCCTTGTGCCTCTAGTACTCTGCGGACACACTCA | |
| | | GGGCGGCAGAAACTTTGCTCTCAGGAGCGATGACTACCCCAAGCA | |
| | | GGGGTCTCCTTACGGAGGCAGTTTTAGCACTACAACCTGGAACTT | |
| | | GAGGGTCCTTTTTGACGAACACCAAAAACACCACAACACGTGGAG | |
| | | CTACCCCAATAACCAGCTAGACCTGGGCAGATACAAGGGCTGCAC | |
| | | CTTCTACTTTTACAGAGACAAAAAGACAGACTACATAGTAAAGTTTC | |
| | | AGAGGAGGGGACCCTTTAAAATAAACAAGTACAGCAGTCCCATGG | |
| | | CCCATCCGGGCATGATGATGCTAGATAAGATGAAAATCCTGGTGC | |
| | | CCAGCTTTGATACCAGGCCCGGGGGTCGCTGA | |
| AAX94183.1 | DQ003341.1 | ATGTACTATGGCTGCATAGGAATTAATTCCACTTTAACAACCAAGTA | 226 |
| | | TGAAAACTTATTTAATAAACTATATTCCAAATGCTGCTACTTTGAAA | |
| | | CCTTTCAAACAATAGCCCAGCTAAATCCTGGCTTTAAAGCTGCTAA | |
| | | AAAGACTACTAATGGTTCTGGTTCTACAGCTGCAACACTAGGAGAC | |
| | | GCAGTAACTGAACTTAAAAACCCAAATGGTACTTTTTACACAGGCA | |
| | | ACAATAGCACCTTTGGCTGCTGCACATATAAACCCACTAAACAAAT | |
| | | AGGTAGTAATGCCAATAAGTGGTTCTGGCATCAGTTAACAGCCACA | |
| | | GATTCAGACACACTAGGCCAATACGGCCGTGCCTCCATTCAGTAT | |
| | | ATGGAGTACCACACAGGCATTTACAGCTCAATTTTTCTTAGCCCAC | |
| | | TAAGAAGCAATCTAGAACTCCCTACAGCATACCAAGATGTAACATA | |
| | | TAATCCACTAACTGACAGAGGTATAGGTAACAGAATCTGGTACCAG | |
| | | TACAGTACCAAAGAAAACACTACATTTAATGAAACACAGTGCAAAT | |
| | | GTGTACTATCAGACTTGCCACTGTGGAGCATGTTTTATGGCTATGT | |
| | | AGATTTTATAGAGTCAGAACTAGGCATCTCAGCAGAGATACACAAC | |
| | | TTTGGCATAGTATGTGTCCAGTGCCCCTACACGTTTCCCCCAATGT | |
| | | TTGACAAATCCAAACCAGATAAAGGCTACGTGTTCTATGACACCCT | |
| | | TTTTGGCAACGGAAAGATGCCAGACGGGAGCGGACACGTACCCA | |
| | | CCTACTGGCAGCAGAGGTGGTGGCCCAGATTCAGCTTCCAGAGAC | |
| | | AAGTGATGCACGACATTATCCTCACCGGGCCCTTCAGCTACAAAG | |
| | | ATGACTCTGTAATGACTGGCATAACCGCAGGCTACAAGTTTAAATT | |
| | | CTCATGGGGCGGTGATATGGTCTCCGAACAGGTCATTAAAAACCC | |
| | | AGAGAGAGGGGACGGACGAGACTCCACCTATCCCGATAGACAGC | |
| | | GCCGCGACTCACAAGTTGTTGACCCACGCTCCATGGGCCCCCAAT | |
| | | GGGTGTTCCACACCTTTGACTACAGACGGGGGCTTTTTGGAAAGG | |
| | | ACGCTATTAAGCGAGTGTCAGAAAAACCGACAGATCCTGACTACTT | |
| | | TACAACACCTTACAAAAAACCAAGATTTTTCCCTCCAACAGCAGGA | |
| | | GAAGAAAAACTGCAAGAAGAAGACTCCGCTTTACAGGAGAAAAGA | |
| | | AGCCCGCTCTCGTCAGAAGAGGGGCAGACGAGGGCGCAAGTCCT | |
| | | CCAGCAGCAGGTCCTCCAGTCGGAGCTCCAGCAGCAGCAGGAGC | |
| | | TCGGGGAGCAGCTCAGATTCCTCCTCAGGGAAATGTTCAAAACCC | |
| | | AAGCGGGCATACACATGAACCCCCGCGCATTTCAGGAGCTGTAA | |
| AAX94186.1 | DQ003342.1 | ATGTACTATGGCTGCATAGGAATTAATTCCACTTTAACAACCAAGTA | 227 |
| | | TGAAAACTTATTTAATAAACTATATTCCAAATGCTGCTACTTTGAAA | |
| | | CCTTTCAAACAATAGCCCAGCTAAATCCTGGCTTTAAAGCTGCTAA | |
| | | AAAGACTACTAATGGTTCTGGTTCTACAGCTGCAACACTAGGAGAC | |
| | | GCAGTAACTGAACTTAAAAACCCAAATGGTACTTTTTACACAGGCA | |
| | | ACAATAGCACCTTTGGCTGCTGCACATATAAACCCACTAAACAAAT | |
| | | AGGTAGTAATGCCAATAAGTGGTTCTGGCATCAGTTAACAGCCACA | |
| | | GATTCAGACACACTAGGCCAATACGGCCGTGCCTCCATTCAGTAT | |
| | | ATGGAGTACCACACAGGCATTTACAGCTCAATTTTTCTTAGCCCAC | |
| | | TAAGAAGCAATCTAGAACTCCCTACAGCATACCAAGATGTAACATA | |
| | | TAATCCACTAACTGACAGAGGTATAGGTAACAGAATCTGGTACCAG | |
| | | TACAGTACCAAAGAAAACACTACATTTAATGAAACACAGTGCAAAT | |
| | | GTGTACTATCAGACTTGCCACTGTGGAGCATGTTTTATGGCTATGT | |
| | | AGATTTTATAGAGTCAGAACTAGGCATCTCAGCAGAGATACACAAC | |
| | | TTTGGCATAGTATGTGTCCAGTGCCCCTACACGTTTCCCCCAATGT | |
| | | TTGACAAATCCAAACCAGATAAAGGCTACGTGTTCTATGACACCCT | |
| | | TTTTGGCAACGGAAAGATGCCAGACGGGAGCGGACACGTACCCA | |
| | | CCTACTGGCAGCAGAGGTGGTGGCCCAGATTCAGCTTCCAGAGAC | |
| | | AAGTGATGCACGACATTATCCTCACCGGGCCCTTCAGCTACAAAG | |
| | | ATGACTCTGTAATGACTGGCATAACCGCAGGCTACAAGTTTAAATT | |
| | | CTCATGGGGCGGTGATATGGTCTCCGAACAGGTCATTAAAAACCC | |
| | | AGAGAGAGGGGACGGACGAGACTCCACCTATCCCGATAGACAGC | |
| | | GCCGCGACTCACAAGTTGTTGACCCACGCTCCATGGGCCCCCAAT | |
| | | GGGTGTTCCACACCTTTGACTACAGACGGGGGCTTTTTGGAAAGG | |
| | | ACGCTATTAAGCGAGTGTCAGAAAAACCGACAGATCCTGACTACTT | |
| | | TACAACACCTTACAAAAAACCAAGATTTTTCCCTCCAACAGCAGGA | |
| | | GAAGAAAAACTGCAAGAAGAAGACTCCGCTTTACAGGAGAAAAGA | |
| | | AGCCCGCTCTCGTCAGAAGAGGGGCAGACGAGGGCGCAAGTCCT | |
| | | CCAGCAGCAGGTCCTCCAGTCGGAGCTCCAGCAGCAGCAGGAGC | |
| | | TCGGGGAGCAGCTCAGATTCCTCCTCAGGGAAATGTTCAAAACCC | |
| | | AAGCGGGCATACACATGAACCCCCGCGCATTTCAGGAGCTGTAA | |
| AAX94189.1 | DQ003343.1 | ATGTACTATGACTGCATAGGAATTAATTCCACTTTAACAACCAAGTA | 228 |
| | | TGAAAACTTATTTAATAAACTATATTCCAAATGCTGCTACTTTGAAA | |
| | | CCTTTCAAACAATAGCCCAGCTAAATCCTGGCTTTAAAGCTGCTAA | |
| | | AAAGACTACTAATGGTTCTGGTTCTACAGCTGCAACACTAGGAGAC | |
| | | GCAGTAACTGAACTTAAAAACCCAAATGGTACTTTTTACACAGGCA | |
| | | ACAATAGCACCTTTGGCTGCTGCACATATAAACCCACTAAACAAAT | |
| | | AGGTAGTAATGCCAATAAGTGGTTCTGGCATCAGTTAACAGCCACA | |
| | | GATTCAGACACACTAGGCCAATACGGCCGTGCCTCCATTCAGTAT | |
| | | ATGGAGTACCACACAGGCATTTACAGCTCAATTTTTCTTAGCCCAC | |
| | | TAAGAAGCAATCTAGAATTCCCTACAGCATACCAAGATGTAACATA | |
| | | TAATCCACTAACTGACAGAGGTATAGGTAACAGAATCTGGTACCAG | |
| | | TACAGTACCAAAGAAAACACTACATTTAATGAAACACAGTGCAAAT | |
| | | GTGTACTATCAGACTTGCCACTGTGGAGCATGTTTTATGGCTATGT | |
| | | AGATTTTATAGAGTCAGAACTAGGCATCTCAGCAGAGATACACAAC | |
| | | TTTGGCATAGTATGTGTCCAGTGCCCCTACACGTTTCCCCCAATGT | |
| | | TTGACAAATCCAAACCAGATAAAGGCTACGTGTTCTATGACACCCT | |
| | | TTTTGGCAACGGAAAGATGCCAGACGGGAGCGGACACGTACCCA | |
| | | CCTACTGGCAGCAGAGGTGGTGGCCCAGATTCAGCTTCCAGAGAC | |
| | | AAGTGATGCACGACATTATCCTCACCGGGCCCTTCAGCTACAAAG | |
| | | ATGACTCTGTAATGACTGGCATAACCGCAGGCTACAAGTTTAAATT | |
| | | CTCATGGGGCGGTGATATGGTCTCCGAACAGGTCATTAAAAACTC | |
| | | AGAGAGAGGGGACGGACGAGACTCCACCTATCCCGATAGACAGC | |
| | | GCCGCGACTTACAAGTTGTTGACCCACGCTCCATGGGCCCCCAAT | |
| | | GGGTATTCCACACCTTTGACTACAGACGGGGGCTTTTTGGAAAGG | |
| | | ACGCTATTAAGCGAGTGTCAGAAAAACCGACAGATCCTGACTACTT | |
| | | TACAACACCTTACAAAAAACCAAGATTTTTCCCTCCAACAGCAGGA | |
| | | GAAGAAAAACTGCAAGAAGAAGACTCCGCTTTACAGGAGAAAAGA | |
| | | AGCCCGCTCTCGTCAGAAGAGGGGCAGACGAGGGCGCAAGTCCT | |
| | | CCAGCAGCAGGTCCTCCAGTCGGAGCTCCAGCAGCAGCAGGAGC | |
| | | TCGGGGAGCAGCTCAGATTCCTCCTCAGGGAAATGTTCAAAACCC | |
| | | AAGCGGGCATACACATGAACCCCCGCGCATTTCAGGAGCTGTAA | |
| AAX94192.1 | DQ003344.1 | ATGTACTATGACTGCATAGGAATTAATTCCACTTTAACAACCAAGTA | 229 |
| | | TGAAAACTTATTTAATAAACTATATTCCAAATGCTGCTACTTTGAAA | |
| | | CCTTTCAAACAATAGCCCAGCTAAATCCTGGCTTTAAAGCTGCTAA | |
| | | AAAGACTACTAATGGTTCTGGTTCTACAGCTGCAACACTAGGAGAC | |
| | | GCAGTAACTGAACTTAAAAACCCAAATGGTACTTTTTACACAGGCA | |
| | | ACAATAGCACCTTTGGCTGCTGCACATATAAACCCACTAAACAAAT | |
| | | AGGTAGTAATGCCAATAAGTGGTTCTGGCATCAGTTAACAGCCACA | |
| | | GATTCAGACACACTAGGCCAATACGGCCGTGCCTCCATTCAGTAT | |
| | | ATGGAGTACCACACAGGCATTTACAGCTCAATTTTTCTTAGCCCAC | |
| | | TAAGAAGCAATCTAGAATTCCCTACAGCATACCAAGATGTAACATA | |
| | | TAATCCACTAACTGACAGAGGTATAGGTAACAGAATCTGGTACCAG | |
| | | TACAGTACCAAAGAAAACACTACATTTAATGAAACACAGTGCAAAT | |
| | | GTGTACTATCAGACTTGCCACTGTGGAGCATGTTTTATGGCTATGT | |
| | | AGATTTTATAGAGTCAGAACTAGGCATCTCAGCAGAGATACACAAC | |
| | | TTTGGCATAGTATGTGTCCAGTGCCCCTACACGTTTCCCCCAATGT | |
| | | TTGACAAATCCAAACCAGATAAAGGCTACGTGTTCTATGACACCCT | |
| | | TTTTGGCAACGGAAAGATGCCAGACGGGAGCGGACACGTACCCA | |
| | | CCTACTGGCAGCAGAGGTGGTGGCCCAGATTCAGCTTCCAGAGAC | |
| | | AAGTGATGCACGACATTATCCTCACCGGGCCCTTCAGCTACAAAG | |
| | | ATGACTCTGTAATGACTGGCATAACCGCAGGCTACAAGTTTAAATT | |
| | | CTCATGGGGCGGTGATATGGTCTCCGAACAGGTCATTAAAAACTC | |
| | | AGAGAGAGGGGACGGACGAGACTCCACCTATCCCGATAGACAGC | |
| | | GCCGCGACTTACAAGTTGTTGACCCACGCTCCATGGGCCCCCAAT | |
| | | GGGTATTCCACACCTTTGACTACAGACGGGGGCTTTTTGGAAAGG | |
| | | ACGCTATTAAGCGAGTGTCAGAAAAACCGACAGATCCTGACTACTT | |
| | | TACAACACCTTACAAAAAACCAAGATTTTTCCCTCCAACAGCAGGA | |
| | | GAAGAAAAACTGCAAGAAGAAGACTCCGCTTTACAGGAGAAAAGA | |
| | | AGCCCGCTCTCGTCAGAAGAGGGGCAGACGAGGGCGCAAGTCCT | |
| | | CCAGCAGCAGGTCCTCCAGTCGGAGCTCCAGCAGCAGCAGGAGC | |
| | | TCGGGGAGCAGCTCAGATTCCTCCTCAGGGAAATGTTCAAAACCC | |
| | | AAGCGGGCATACACATGAACCCCCGCGCATTTCAGGAGCTGTAA | |

[0411] In some embodiments, the genetic element comprises a nucleotide sequence encoding a capsid protein or a functional fragment of a capsid protein or a sequence having at least about 60%, 70% 80%, 85%, 90% 95%, 96%, 97%, 98%, 99%, or 100% sequence identity to any one of the amino acid sequences described herein, e.g., in any of Tables 2, 4, 6, 8, 10, 12, 14, or 16. In some embodiments, the substantially non-pathogenic protein comprises a capsid protein or a functional fragment of a capsid protein or a sequence having at least about 60%, 65%, 70%, 75%, 80%, 85%, 90% 95%, 96%, 97%, 98%, 99%, or 100% sequence identity to any one of the amino acid sequences described herein, e.g., in any of Tables 2, 4, 6, 8, 10, 12, 14, or 16.

TABLE 16
Examples of amino acid sequences of substantially non-pathogenic
proteins, e.g., capsid proteins

| Accession # | Accession # | | |
|---|---|---|---|
| (nucleotide | (protein | | |
| sequence) | sequence) | Protein Sequence | SEQ ID NO: |
| AF079173.1 | AAC28465.1 | MAYGWWRRRRRRWRRWRPRPWRPRWRTRRRRPARR | 230 |
| | | RGHRRNVRRRRRGGRWRRRYRRWKRKGRRRKKAKIIIR | |
| | | QWQPNYRRRCNIVGYIPVLICGENTVSRNYATHSDDTNY | |
| | | PGPFGGGMTTDKFTLRILYDEYKRFMNYWTASNEDLDLC | |
| | | RYLGVNLYFFRHPDVDFIIKINTMPPFLDTELTAPRLHPGM | |
| | | LALDKRARWIPSLKSIPGKKHYIKIRVGAPKMFTDKWYPQ | |
| | | TDLCDMVLLTVYATAADIPYPFGSPLTDSVVVNFQVLQSM | |
| | | YDKYISILPDQKSQSKSLLSNIANYIPFYNTTQTIAQLKPFID | |
| | | AGNITSGTAATTWGSYINTTKFTTTATTTYTYPGTTTNTVT | |
| | | MYSSNDSWYRGTVYNNQIKELPKKAAELYSKATKTLLGN | |
| | | TFTTEDCTLEYHGGLYSSIWLSPGRSYFETPGAYTDIKYN | |
| | | PFTDRGEGNMLWIDWLSKKNMNYDKVQSKCLVSDLPLW | |
| | | ASAYGYVEFCAKSTGDQNIHMNARLLIRSPFTDPQLLVHT | |
| | | DPTKGFVPYSLNFGNGKMPGGSSNVPIRMRAKWYPTLF | |
| | | HQQEVLEALAQSGPFAYHSDIKEVSLGMKYRFKWIWGG | |
| | | NPVRQQVVRNPCKETHSSGNRVPRSLQIVDPKYNSPELT | |
| | | FHTWDFRRGLFGPKAIQRMQQQPTTTDIFSAGRKRPRR | |
| | | DTEVYHSSQEGEQKESLLFPPVKLLRRVPPWEDSQQEE | |
| | | SGSQSSEEETQTVSQQLKQQLQQQQILGVKLRLLFDQV | |
| | | QKIQQNQDINPTLLPRGGDLASLFQIAP* | |
| AF129887.1 | AAD20024.1 | MAYGLWRRRRRRWKRWRRRRWRRRWRTRRRRPAGR | 231 |
| | | RRRRRTVRRRRRRGRWRRRYRRWRRKGRRRKKKKLII | |
| | | RQWQPNYTRKCNIVGYMPVIMCGENTVSRNYATHSDDT | |
| | | NYPGPFGGGMTTDKFTLRILYDWYKRFMNYWTASNEDL | |
| | | DLCRYLGVNLYFFRHPDVDFIIKINTMPPFLDTELTAPSIHP | |
| | | GMLALDERARWIPSLKSRPGKKHYIKIRVGAPKMFTDKW | |
| | | YPQTDLCDMVLLTVYATAADMQYPFGYPLTDSVVVNFQV | |
| | | LQSMYDKYISILPDQKSQRESLLSNIANYIPFYNTTQTIAQL | |
| | | KPFIDAGNITSGTTATTWGSYINTTKFTTTATTTYTYPGTT | |
| | | TNTVTMLTSNDSWYRGTVYNNQIKELPKKAAELYSKATK | |
| | | TLLGNTFTTEDCTLEYHGGLYSSIWLSPGRSYFETPGAYT | |
| | | DMKYNPFTDRGEGNMLWIDWLSKKNMNYDKVQSKCLV | |
| | | SDLPLWAAAYGYLEFCSKSTGDTNIHMNARLLIRSPFTDP | |
| | | QLIAHTDPTKGFVPYSLNFGNGKMPGGSSNVPIRMRAK | |
| | | WYPTLFHQQEVLEALAQSGPFAYHSDIKKVSLGIKYRFK | |
| | | WIWGGNPVRQQVVRNPCKEPHSSVNRVPRSIQIVDPKY | |
| | | NSPELTIHAWDFRRGFFGPKAIQRMQQQPTATEFFSAGR | |
| | | KRPRRDTEVYQSDQEKEQKESSLFPPVKLLRRVPPWED | |
| | | SEQEQSGSQSSEEETHTVSQQLKQQLQQQRILGVKLRV | |
| | | LFHQVHKIQQNQHINPTLLPRGGALASLSQIAP* | |
| AF116842.1 | AAD29634.1 | MAYGLWHRRRRRWRRWKRTPWKRRWRTRRRRPARR | 232 |
| | | RGRRRNVRRRRRGGRWRRRYRRWKRKGRRRKKAKIIIR | |
| | | QWQPNYRRRCNIVGYIPVLICGENTVSRNYATHSDDTNY | |
| | | PGPFGGGMTTDKFTLRILCDEYKRFMNYWTASNEDLDLC | |
| | | RYLGVNLYFFRHPDVDFIIKINTMPPFLDTELTAPSIHPGM | |
| | | LALDKRARWIPSLKSRPGKKHYIKIRVGAPKMFTDKWYP | |
| | | QTDLCDMVLLTVYATTADMQYPFGSPLTDSVVVNFQVLQ | |
| | | SMYDKTISILPDEKSQREILLNKIASYIPFYNTTQTIAQLKPF | |
| | | IDAGNVTSGATATTWASYINTTKFTTATTTTYAYPGTNRP | |
| | | PVTMLTCNDSWYRGTVYNTQIQQLPIKAAKLYLEATKTLL | |
| | | GNNFTNEDYTLEYHGGLYSSIWLSPGRSYFETTGAYTDIK | |
| | | YNPFTDRGEGNMLWIDWLSKKNMNYDKVQSKCLVRDLP | |
| | | LWAAAYGYVEFCAKSTGDKNIYMNARLLIRSPFTDPQLLV | |
| | | HTDPTKGFVPYSLNFGNGKMPGGSSNVPIRMRAKWYPT | |
| | | LFHQQEVLEALAQSGPFAYHSDIKKVSLGMKYRFKWIWG | |
| | | GNPVRQQVVRNPCKETHSSGNRVPRSLQIVDPKYNSPE | |
| | | LTFHTWDFRRGLFGPRAIQRMQQQPTTTDILSAGRKRPR | |
| | | KDTEVYHPSQEGEQKESLLFPPVKLLRRVPPWEDSQQE | |
| | | ESGSQSSEEETQTVSQQLKQQLQQQQILGVKLRLLFDQV | |
| | | QKIQQNQDINPTLLPRGGDLASLFQIAP* | |
| AB026345.1 | BAA85662.1 | MAYGWWRRRRRRWRRWRRRPWRRRWRTRRRRPARR | 233 |
| | | RGRRRNVRRRRRGGRWRRRYRRWKRKGRRRKKAKIIIR | |
| | | QWQPNYRRRCNIVGYIPVLICGENTVSRNYATHSDDTNY | |
| | | PGPFGGGMTTDKFTLRILYDEYKRFMNYWTASNEDLDLC | |
| | | RYLGVNLYFFRHPDVDFIIKINTMPPFLDTELTAPSIHPGM | |
| | | LALDKRARWIPSLKSRPGKKHYIKIRVGAPKMFTDKWYP | |
| | | QTDLCDMVLLTVYATAADMQYPFGSPLTDSVVVNFQVLQ | |
| | | SMYDEKISILPDQKSQRESLLTSIANYIPFYNTTQTIAQLKP | |
| | | FIDAGNVTSGTTATTWGSYINTTKFTTTATTTYTYPGTTTT | |
| | | TVTMLTSNDSWYRGTVYNNQIKDLPKKAAELYSKATKTLL | |
| | | GNTFTTEDYTLEYHGGLYSSIWLSPGRSYFETPGAYTDIK | |
| | | YNPFTDRGEGNMLWIDWLSKKNMNYDKVQSKCLISDLPL | |
| | | WAAAYGYVEFCAKSTGDQNIHMNARLLIRSPFTDPQLLV | |
| | | HTDPTKGFVPYSLNFGNGKMPGGSSNVPIRMRAKWYPT | |
| | | LFHQQEVLEALAQSGPFAYHSDIKKVSLGMKYRFKWIWG | |
| | | GNPVRQQVVRNPCKETHSSGNRVPRSLQIVDPKYNSPE | |
| | | LTFHTWDFRRGLFGPKAIQRMQQQPTTTDIFSAGRKRPR | |
| | | RDTEVYHSSQEGEQKESLLFPPVKLLRRVPPWEDSQQE | |
| | | ESGSQSSEEETQTVSQQPKQQLQQQRILGVKLRLLFNQV | |
| | | QKIQQNQDINPTLLPRGGDLASLFQVAP* | |
| AB026346.1 | BAA85664.1 | MAYGWWRRRRRRWRRWRRRPWRRRWRTRRRRPARR | 234 |
| | | RGRRRNVRRRRRGGRWRRRYRRWKRKGRRRKKAKIIIR | |
| | | QWQPNYRRRCNIVGYIPVLICGENTVSRNYATHSDDTNY | |
| | | PGPFGGGMTTDKFTLRILYDEYKRFMNYWTASNEDLDLC | |
| | | RYLGVNLYFFRHPDVDFIIKINTMPPFLDTELTAPSIHPDM | |
| | | LALDKRARWIPSLKSRPGKKHYIKIRVGAPKMFTDKWYP | |
| | | QTDLCDMVLLTVYATTADMQYPFGSPLTDSVVVNFQVLQ | |
| | | SMYDENISILPTEKSKRDVLHSTIANYTPFYNTTQIIAQLRP | |
| | | FVDAGNLTSASTTTTWGSYINTTKFNTTATTTYTYPGSTT | |
| | | TTVTMLTCNDSWYRGTVYNNQISKLPKQAAEFYSKATKT | |
| | | LLGNTFTTEDHTLEYHGGLYSSIWLSAGRSYFETPGAYT | |
| | | DIKYNPFTDRGEGNMLWIDWLSKNNMNYDKVQSKCLISD | |
| | | LPLWAAAYGYVEFCAKSTGDQNIHMNARLLIRSPFTDPQ | |
| | | LLVHTDPTKGFVPYSLNFGNGKMPGGSSNVPIRMRAKW | |
| | | YPTLFHQQEVLEALAQSGPFAYHSDIKKVSLGMKYRFKW | |
| | | IWGGNPVRQQVVRNPCKETHSSGNRVPRSLQIVDPKYN | |
| | | SPELTFHTWDFRRGLFGPKAIQRMQQQPTTTDIFSAGRK | |
| | | RPRRDTEVYHSSQEGEQKESLLFPPVKLLRRVPPWEDS | |
| | | QQEESGSQSSEEETQTVSQQLKQQLQQQRILGVKLRLLF | |
| | | NQVQKIHQNQDINPTLLPRGGDLASLFQIAP* | |
| AB026347.1 | BAA85666.1 | MAYGWWRRRRRRWRRWRRRPWRRRWRTRRRRPARR | 235 |
| | | RGRRRNVRRRRRGGRWRRRYRRWKRKGRRRKKAKIIIR | |
| | | QWQPNYRRRCNIVGYIPVLICGENTVSRNYATHSDDTNY | |
| | | PGPFGGGMTTDKFTLRILYDEYKRFMNYWTASNEDLDLC | |
| | | RYLGVNLYFFRHPDVDFIIKINTMPPFLDTELTAPSIHPGM | |
| | | LALDKRARWIPSLKSRPGKKHYIKIRVEAPKMFTDKWYPQ | |
| | | TDLCDMVLLTVYATTADMQYPFGSPLTDSVVVNFQVLQS | |
| | | MYDQNISILPTEKSKRTQLHDNITRYTPFYNTTQTIAQLKP | |
| | | FVDAGNVTPVSPTTTWGSYINTTKFTTTATTTYTYPGTTT | |
| | | TTVTMLTCNDSWYRGTVYNNQISQLPKKAAEFYSKATKT | |
| | | LLGDTFTTEDYTLEYHGGLYSSIWLSAGRSYFETPGVYTD | |
| | | IKYNPFTDRGEGNMLWIDWLSKKNMNYDKVQSKCLISDL | |
| | | PLWAAAYGYVEFCAKSTGDQNIHMNAKLLIRSPFTDPQLL | |
| | | VHTDPTKGFVPYSLNFGNGKMPGGSSNVPIRMRAKWYP | |
| | | TLFHQQEVLEALAQSGPFAYHSDIKKVSLGMKYRFKWIW | |
| | | GGNPVRQQVVRNPCKETHSSGNRVPRSLQIVDPKYNSP | |
| | | ELTFHTWDFRRGLFGPKAIQRMQQQPTTTDIFSAGRKRP | |
| | | RRDTEVYHSSQEGEQKESLLFLPVKLLRRVPPWEDSQQ | |
| | | EESGSQSSEEETQTVSQQLKQQLQQQRILGVKLRLLFNQ | |
| | | VQKIQQNQDINPTLLPRGGDLASLFQIAP* | |
| AB030487.1 | BAA90406.1 | MAYGWWRRRRRRWKRWRRRPRWRRPWRTRRRRPAR | 236 |
| | | RRGRRRTVRRRERGRWRRRYRRWRKKGKRRIKKKLIIR | |
| | | QWQPNYTRKCDILGYMPVIMCGENTLIRNYATHANDCY | |
| | | WPGPFGGGMATQKFTLRILYDDYKRFMNYVVTSSNEDLD | |
| | | LCRYRGVTLYFFRHPDVDFIILINTTPPFVDTEITGPSIHPG | |
| | | MMALNKRARFIPSLKTRPGRRHIVKIRVGAPKLYEDKWYP | |
| | | QSELCDMPLLTVYATAADMQYPFGSPLTDTPVVTFQVLR | |
| | | SMYNDALSILPSNFEQDDNAGQKLYNEISSYLPYYNTTET | |
| | | IAQLKRYVENTEKISTTPNPWQSNYVNTITFTTAQSITTTT | |
| | | PYTTFSDSWYRGTVYKNAITKVPLAAAKLYETQTKNLLSP | |
| | | TFTGGSEYLEYHGGLYSSIWLSAGRSYFETKGAYTDICY | |
| | | NPYTDRGEGNMLWIDWLSKGDSRYDKARSKCLIEKLPM | |
| | | WAAVYGYAEYCAKATGDSNIDMNARVVMRCPYTVPQMI | |
| | | DTSDPLRGFIPYSFNFGKGKMPGGTNQVPIRMRAKWYP | |
| | | CLFHQKEVLEAIGQSGPFAYHSDQKKAVLGLKYRFHWIW | |
| | | GGNPVFPQVVRNPCKDTQGSTGPRKPRSVQIIDPKYNTP | |
| | | ELTIHAWDFRRGFFGPKAIKRMQQQPTDAELLPPGRKRS | |
| | | RRDTEVLQSSQERQKESLLLQQLHLQGRVPPWESLQGL | |
| | | QTETESQKEHEGTLSQQIREQVQQQKLLGRQLREMFLQ | |
| | | LHKILQNQHVNPTLLPRDQGLIWWFQIQ* | |
| AB030488.1 | BAA90409.1 | MAYGWWRRRRRRWKRWRRRPRWRRPWRTRRRRPAG | 237 |
| | | RRGRRRTVRRRRRGRWRRRYRRWRKKGRRRRKKKLII | |
| | | RQWQPNYTRKCNIVGYMPVIMCGENTLIRNYATHAYNCS | |
| | | WPGPFGGGMATQKFTLRILYDDYKRFMNYWTSSNEDLD | |
| | | LCRYRGATLYFFRDPDVDFIILINTTPPFVDTEITGPSIHPG | |
| | | MLALNKRARFIPSLKTRPSRRHIVKIRVGAPKLYEDKWYP | |
| | | QSELCDMPLLTVYATATDMQYPFGSPLTDTPIVTFQVLRS | |
| | | MYNDALSILPSNFEGDDSAGAKLYKQISEYIPYYNTTETIA | |
| | | QLKGYVENTEKTQTTPNPWQSKYVNTKPFDTAQTITNQK | |
| | | PYTPFADTWYRGTAYKEEIKNVPLKAAELYELHTTHLLST | |
| | | TFTGGSKYLEYHGGLYSSIWLSAGRSYFETKGAYTDICY | |
| | | NPYTDRGEGNMVWIDWLVKTDSRYDKTRSKCLIEKLPLW | |
| | | AAVYGYAEYCAKATGDSNIDMNARVVIRSPYTTPQMIDT | |
| | | NDSLRGFIVYSFNFGKGKMPGGTNQVPIRMRAKWYPCL | |
| | | FHQKEVLEAIGQSGPFAYHSDQKKAVLGLKYRFHWIWG | |
| | | GNPVFPQVVRNPCKDTQGSTGPRKPRSVQIIDPKYNTPE | |
| | | LTIHAWDFRRGFFGPKAIKRMQQQPTDAELLPPGRKKSR | |
| | | RDTEVLQSSQERQKESLLFQQLQLQRRVPPWESSQGSQ | |
| | | TETESQKEQEGTLSQQLREQLQQQKLLGRQLREMFLQIH | |
| | | KILQNQQVNPILLPRDQALISWFQIQ* | |
| AB030489.1 | BAA90412.1 | MAYGWWRRRRRRWKRWRRRPRWRRRWRTRRRRPAG | 238 |
| | | RRRRRRTVRRRRRGRWRSRYRRWRRKGRRRRKEKLII | |
| | | RQWQPNYTRKCNIVGYMPVIMCGENTVIRNYATHTYDCS | |
| | | WPGPFGGGMATQKFTLRILYDDYKRFMNYWTSSNEDLD | |
| | | LCRYRGATLYFFRDPDVDFIILINTTPPFVDTEITGPSIHPG | |
| | | MLALNKRARFIPSLKTRPGRRHIVKIKVGAPRMYEDKWYP | |
| | | QSELCDMPLLTIYATATDMQHPFGSPLTDTPVVTFQVLRS | |
| | | MYNDALSILPSNFEDDSSPGAALYKQISEYIPYYNTTETIA | |
| | | QLKRYVENTEKTQTTLNPWQSRYVNTTLFNTAETIANQK | |
| | | PYTKFADTWYRGTAYKDAIKDIPLKAAELYVNQTKYLLST | |
| | | TFTGGSKYLEYHGGLYSSIWLSAGRSYFETKGAYTDICY | |
| | | NPYTDRGEGNMVWIDWLSKTDSKYDKTRSKCLIEKLPLW | |
| | | ASVYGYAEYCAKATGDSNIDMNARVVIRCPYTTPQMIDTT | |
| | | DPTRGFIVYSFNFGKGKMPGGSNEVPIRMRAKWYPCLF | |
| | | HQKEVLEAIGQSGPFAYHSDQKKAVLGLKYKFHWIWGG | |
| | | NPVFPQVIKNPCKNTQFSTGPRKPRSLQIIDPNYNTPKLTI | |
| | | HAWDFRLGFFGPKAIKRMQQQPTDAELLPPGRKRSRRD | |
| | | TEVLQSSQERQKGNLLFQQFQLQRRVPPWESSQGSQT | |
| | | GTQSQKEQEGTLSQQLREQLQQQKLLGRQLREMFLQLH | |
| | | KIQQNQHVNPTLLPRDQALICWFQIQ* | |
| AB038340.1 | BAA90825.1 | MAYGWWRRRRRRWRRWRRRPWRRRWRTRRRRPARR | 239 |
| | | RGRRRNVRRRRRGGRWRRRYRRWKRKGRRRKKAKIIIR | |
| | | QWQPNYRRRCNIVGYIPVLICGENTVSRNYATHSDDTNY | |
| | | PGPFGGGMTTDKFTLRILYDEYKRFMNYWTASNEDLDLC | |
| | | RYLGVNLYFFRHPDVDFIIKINTMPPFLDTELTAPSIHPGM | |
| | | LALDKRARWIPSLKSRPGKKHYIKIRVGAPKMFTDKWYP | |
| | | QTDLCDMVLLTVYATAADMQYPFGSPLTDSVVVNFQVLQ | |
| | | SMYDEKISILPDQKSQRESLLTSIANYIPFYNTTQTIAQLKP | |
| | | FIDAGNVTSGTTATTWGSYINTTKFTTTATTTYTYPGTTTT | |
| | | TVTMLTSNDSWYRGTVYNNQIKDLPKKAAELYSKATKTLL | |
| | | GNTFTTEDYTLEYHGGLYSSIWLSPGRSYFETPGAYTDIK | |
| | | YNPFTDRGEGNMLWIDWLSKKNMNYDKVQSKCLISDLPL | |
| | | WAAAYGYVEFCAKSTGDQNIHMNARLLIRSPFTDPQLLV | |
| | | HTDPTKGFVPYSLNFGNGKMPGGSSNVPIRMRAKWYPT | |
| | | LFHQQEVLEALAQSGPFAYHSDIKKVSLGMKYRFKWIWG | |
| | | GNPVRQQVVRNPCKETHSSGNRVPRSLQIVDPKYNSPE | |
| | | LTFHTWDFRRGLFGPKAIQRMQQQPTTTDIFSAGRKRPR | |
| | | RDTEVYHSSQEGEQKESLLFPPVKLLRRVPPWEDSQQE | |
| | | ESGSQSSEEETQTVSQQPKQQLQQQRILGVKLRLLFNQV | |
| | | QKIQQNQDINPTLLPRGGDLASLFQVAP* | |
| AB038622.1 | BAA93586.1 | TAWWWGRWRRRWRPRYRRRTWRVRRRRPRRTFRRR | 240 |
| | | RRGRYVSRRRRRRYYRRRLRRGRRRGRRKRHRQTLVL | |
| | | RQWQPDIVRHCKITGWMPLIICGSGSTQNNFITHMDDFP | |
| | | PMGYSFGGNFTNLSFSLEGIYEQFLYHRNRWSRSNHDL | |
| | | DLARYKGTTLKLYRHHTLDYIVSYNRTGPFQISDMTYLST | |
| | | HPALMLLQKHRIVVPSLLTKPKGKRSIKVRIKPPKLMLNK | |
| | | WYFTKDICSMGLFQLQATACTLYNPWLRDTTKSPVIGFR | |
| | | VLKNSIYTNLSNLPEHDQTRQAIRRKLHPDSLTGSTPYQK | |
| | | GWEYSYTKLMAPIYYQANRNSTYNWLNYQTNYAQTFTK | |
| | | FKEKMNENLALIQKEYSYHYPNNVTTDLIGKNTLTHDWGI | |
| | | YSPYWLTPTRISLDWETPWTYVRYNPLADKGIGNAVYAQ | |
| | | WCSEQTSKLDTKKSKCIMKDLPLWCIFYGYVDWIIKSTGV | |
| | | SSAVTDMRVAIISPYTEPALIGSSPDVGYIPVSDTFCNGD | |
| | | MPFLAPYIPVGWWIKWYPMIAHQKEVFEAIVNCGPFVPR | |
| | | DQTTPSWEITMGYKMDWLWGGSPLPSQAIDDPCQKPTH | |
| | | ELPDPDRHPRMLQVSDPTKLGPKTVFHKWDWRRGMLS | |
| | | KRSIKRVQEDSTDDEYVAGPLPRKRNKFDTRAQGLQTPE | |
| | | KESYTLLQALQESGQETSSEDQEQAPQEKEGQKEALME | |
| | | QLQLQKQHQRVLKRGLKLLLGDVLRLRRGVHWDPLLS* | |
| AB038623.1 | BAA93589.1 | TAWWWGRWRRRWRPRYRKRTWRLRRRRPRRTFRRR | 241 |
| | | RRRQYVSRRRRRRYYRRRLRRGRRRGRRKRHRQTLVL | |
| | | RQWQPDVVRHCKITGWMPLIICGSGSTQNNFITHMDDFP | |
| | | PMGYSFGGNFTNLTFSLEGIYEQFLYHRNRWSRSNHDL | |
| | | DLARYKGTTLKLYRHHTLDYIVSYNRTGPFQISDMTYPST | |
| | | HPALMLLQKHRIVVPSVLTKPKGKRSIKVRIKPPKLMLNK | |
| | | WYFTKDICSMGLFQLQATACTLYNPWLRDTTKSPVIGFR | |
| | | VLKNSIYTNLSNLPDHEGSREAIRKKLHPQSLTGHSPNQK | |
| | | GWEYSYTKLMAPIYYSANRNSTYNWLNYQDNYVATYTK | |
| | | FKVKMTDNLQLIQKEYSYHYPNNTTTDLIKNNTLTHDWGI | |
| | | YSPYWLTPTRISLDWETPWTYVRYNPLADKGIGNAVYAQ | |
| | | WCSEQTSKLDPKKSKCIMRDLPLWCIFYGYVDWIVKSTG | |
| | | VSSAVTDMRVAIRSPYTEPALIGSTEDVGFIPVSDTFCNG | |
| | | DMPFLAPYIPVGWWIKWYPMIAHQKEVFEQIVNCGPFVP | |
| | | RDQTTPSWEITMGYKMDWLWGGSPLPSQAIDDPCQKPT | |
| | | HELPDPDRHPRMLQVSDPTKLGPKTVFHRWDWRRGML | |
| | | SKRSIKRVQEDSTDDEYVAGPLPRKRNKFDTRAQGLQSP | |
| | | EKESYTLLQALQESGQESSSEDQEQAPQEKEGQKEALM | |
| | | EQLQLQKQHQRVLKRGLKLLLGDVLRLRRGVHWDPLLS* | |
| AB038624.1 | BAA93592.1 | TAWWWGRWRRRWRPRYRRRTWRVRRRRPRRTFRRR | 242 |
| | | RRGRYVSRRRRRRYYRRRLRRGRRRGRRKRHRQTLVL | |
| | | RQWQPDVLRRCKITGWMPLIICGSGSTQNNFITHMDDFP | |
| | | PMGYSYGGNFTNLTFSLEGIYEQFLYHRNRWSRSNHDL | |
| | | DLARYKGTTLKLYRHHTLDYIVSYNRTGPFQISDMTYLST | |
| | | HPALMLLQKHRIVVPSLLTKPKGKRSIKVRIKPPKLMLNK | |
| | | WYFTKDICSMGLFQLQATACTLYNPWLRDTTKSPVIGFR | |
| | | VLKNSIYTNLSNLPDHEGAREAIRKKLHPQSLTGSVPNQK | |
| | | GWEYSYTKLMAPIYYQAIRNSTYNWLNYQQNYSQTYQTF | |
| | | KQKMQDNLQLIQKEYMYHYPNNVTTDILGKNTLTHDWGI | |
| | | YSPYWLTPTRISLDWETPWTYVRYNPLADKGIGNAVYAQ | |
| | | WCSEQTSNLDTKKSKCIMKDLPLWCIFYGYVDWVVKSTG | |
| | | VSSAVTDMRVAIISPYTEPALIGSSPEVGYIPVSDTFCNGD | |
| | | TPFLAPYIPVGWWIKWYPMIAHQKEVFEAIVNCGPFVPRD | |
| | | QTTPSWEITMGYKMDWLWGGSPLPSQAIDDPCQKPTHE | |
| | | LPDPDRHPRMLQVSDPTKLGPKTVFHKWDWRRGMLSK | |
| | | RSIKRVQEDSTDDEYVAGPLPRKRNKFDTRAQGLQSPEK | |
| | | ESYTLLQALQESGQETSSEDQEQAPQEKEGQKEALMEQ | |
| | | LQLQKQHQRVLKRGLKLLLGDVLRLRRGVHWDPLLS* | |
| AF254410.1 | AAF71533.1 | MAQGRRRYRRGWQRRVYLRRRRRRRRKRLVLTQWHP | 243 |
| | | AVRRKCTITGYMPVVWCGHGRASYNYAWHSDDCIKQP | |
| | | WPFGGSLSTVSFNLKVLYDENQRGLNRWTYPNDQLDLG | |
| | | RYKGCKLTFYRTKNTNYPGPFGGGMTTDKFTLRILYDEY | |
| | | KRFMNYWTASNEDLDLCRYLGVNLYIFRHPDVDFIIKINT | |
| | | MPPFLDTEITAASIHPGILALDKRARWIPSLKSRPGKKHYI | |
| | | KIRVGAPKMFTDKWYPQTDLCDMVLLTIYATAADMQYPF | |
| | | GSPLTDTVVVNFQVLQSMYDENISILPDQKTQREKLLTSIS | |
| | | NYIPFYNTTQTIAQLKPFVDAGNKVSGTTTTTWASYINTT | |
| | | RFTTTATTTYTYPGSTTNTVTMLTSNDSWYRGTVYNNQI | |
| | | KNLPKQAAELYSKATKTLLGNTFTTEDYTLEYHGGLYSSI | |
| | | WLSPGRSYFETPGAYTDIKYNPFTDRGEGNMLWIDWLS | |
| | | KKNMNYDKVQSKCLVSDLPLWAAAYGYVEFCAKSTGDQ | |
| | | NIHMNARLLIRSPFTDPQLLVHTDPTKAFVPYSLNFGNGK | |
| | | MPGGSSNVPIRMRAKWYPTLFHQQEVLEALAQSGPFAY | |
| | | HSDIKKVSLGIKYRFKWIWGGNPVRQQVVRNPCKEPHSS | |
| | | GNRVPRSIQIVDQKYNSPELTIHSWDFRRGFFGPKAIQR | |
| | | MQQQPTATEFFSAGRKRPRRDTEVYQSDQEKEQKESSL | |
| | | FPPVKLLRRVPPWEDSDRKQSGSQSSEEETQTVSQQLK | |
| | | QQLQQQRILGVKLRLLFYQIQRIQQNQDINPTLLPRGGDL | |
| | | ASLFQIA* | |
| AB050448.1 | BAB19928.1 | MAWTWWWQRRRRRWPWRRRRWRRLRTRRPRRLVRR | 244 |
| | | RRKRYRVRRRRRWGRRRGRRTYLRRGLKKRKRRKKLR | |
| | | LTQWNPSTIRGCTIKGMAPLIVCGHTMAGNNFAIRMEDY | |
| | | VSQIKPFGGSFSTTTWSLKVLWDEHTRFHNTWSYPNTQL | |
| | | DLARFKGVTFYFYRDKDTDFIITYSSVPPFKIDKYSSAMLH | |
| | | PGMLMQRKKKILLPSFTTRPRGRKKVKVHIKPPVLFEDK | |
| | | WYTQQDLCDVNLLSLAVSAASFRHPFCPPQTDNICITFQV | |
| | | LKDKYYTQMSVTPDTAGTKKDDEILDHLYSTAEYYQTVH | |
| | | TQGIINKTQRVAKFSTSNNTLGDQSEISLYLNQPTTTNIGN | |
| | | TLSTGHNSVYGFPSYNPQKDKLRKIADWFWTQEANKEN | |
| | | VVTGSYSMPTNKAVGYHLGKYSPIFLSSYRTNLQFRTAY | |
| | | TDVTYNPLNDKGKGNEIWVQYVTKPDTVFNPTQCKCHVI | |
| | | DLPLWSAFHGYIDFVQSELGIQEEILNIAIIVVICPYTKPKLV | |
| | | HETNPKQGFVFYDTQFGDGKMPEGSGLVPIYYQNRWYP | |
| | | RIKFQSQVVHDFILTGPFSYKDDLKSTVLTVEYKFKFLWG | |
| | | GNMIPEQVIRNPCKTEGHDLPHTSRLHRDLQVVDPHTVG | |
| | | PQWALHTWDWRRGLFGSEAIKRVSEQQVHDELYYPPSK | |
| | | KPRFLPPISGLQEQERDYSSQEEKEQSSSEEETDPKKKE | |
| | | QKQQQRLHLQFQEQQRLGNQLRLIFRELQKTQAGLHLN | |
| | | PMLSNRL* | |
| AY026465.1 | AAK01940.1 | MAWGWWKRRRRWWFRKRWTRGRLRRRWPRPARRRP | 245 |
| | | RRRRVRRRRRWRRGRPRRRLYRRYRRKKRRRRKPKIIL | |
| | | KQWQPDIVKRCYIVGYIPAIICGAGTWSHNYTSHLLDIIPK | |
| | | GPFGGGHSTMRFSLKVLFEEHLRHLNFWTRSNQDLELV | |
| | | RYFRCSFRFYRDQHTDYLVHYNRKTPLGGNRLTAPSLHP | |
| | | GVQMLSKNKIIVPSYDTKPKGKSYVKVTIAPPTLLTDKWY | |
| | | FAKDVCDTTLVNLDVVLCNLRFPFCSPQTDNPCITFQVLH | |
| | | SIYNDFLSIVDTQEYKNNFVTTLSTKLGTTWGSRLNTFRT | |
| | | EGCYSHPKLPKKQVTAANDSTYFTQPDGLWGDAVFETK | |
| | | DTTIITKNMESYATSAKQRGVNGDPAFCHLTGIYSPPWLT | |
| | | PGRISPETPGLYTDVTYNPYADKGVGNRIWVDYCSKKGN | |
| | | KYDNTSKCLLEDMPLWMVTFGYVDWVKKETGNWGIPLW | |
| | | ARVLIRSPYTVPKLYNEADPSYGWVPISYYFGEGKMPNG | |
| | | DMYVPFKVRMKWYPSMWNQEPVLNDLAKSGPFAYKDT | |
| | | KTSVTVTTKYKFTFNFGGNPVPSQIVQDPCTQPTYDIPGT | |
| | | GNLPRRIQVIDPKVLGPHYSFHRWDFRRGLFGQQAIKRV | |
| | | SEQQTTSEFLFSGPKRPRIDQGPYIPPEKGSDSLQRESR | |
| | | PWSTSESEAETEAPSEEEPENQEEQVLQLQLRQQLREQ | |
| | | RKLRQGIQCLFEQLITTQQGVHKNPLLE* | |
| AY026466.1 | AAK01942.1 | MAYGWWARRRRRWRRWKRRPWRRRWRTRRRRPRRR | 246 |
| | | YRRRRHVRRRRRGRWRRRYRKWRRKGRRRGKKKIIIRQ | |
| | | WQPNYRRRCNIIGYMPVLICGNNTVSRNYATHSDDSYLP | |
| | | GPFGGGMTTDKFTLRILYDEYCRFMNYWTASNEDLDLC | |
| | | RYRGCTLWFFRHPDVDFIILINTMSPFLDTQLTGPSIHPGL | |
| | | MALNKRARWIPSLKSRPGRKHVVKIRVGAPRMFTDKWY | |
| | | PQSDLCDLPLLTIFASAADMQYPFGSPLTDSVVVGFQVL | |
| | | QSMYNDCLSILPENFNGNGKGKALHDNITKYLPNYNTTQ | |
| | | TLAQLKPYIDNTSTGSTNNWSSYVNTSKFTTASKTITTSA | |
| | | EGPYYTFADTWYRGTAYNNSITNVPLQAAQLYHDTTKKL | |
| | | LGTTFTGGSPYLEYHGGLYSSIWLSAGRSYFETKGTYTDI | |
| | | TYNPFTDRGQGNMVWIDWVSKYDSVYSKTQSKCLIENLP | |
| | | LWASVYGYAEYCSKSTGDTNIEQNCRVVIRSPFTNPQLL | |
| | | DHNNPLRGYVPYSINFGNGKMPGGSSQVPIRMRSKWYP | |
| | | TLFHQKEVLEAIAQAGPFAYHSDQMKVSLGMKYAFKWV | |
| | | WGGNPVSQQVVRNPCKDTGVSSGNRVPRSVQIVDPKY | |
| | | NTPELAIHAWDFRRACLAQKLLRECKQNRTLLNFFRQGE | |
| | | KDTGETQKLYSPAKKNNKKKTYFSSQSSSSDQSPVGGV | |
| | | GPKPKRGRGGPTRDADTLPAAPAAAQGAAAHGGPTPSP | |
| | | VPTITTGPTKHTYRPYLFARGAGVTSLFQTA* | |
| AF345521.1 | AAK11696.1 | MAWWGRWRRWPRRRWRRWRRRRRRRLPTRRTRRAV | 247 |
| | | RGLGRRPRKTVRRRRRRPRRTYRRGWRRRRYIRRRRG | |
| | | RRKKLTLTMWNPNIVRRCNIEGGLPLILCGENRAAFNYAY | |
| | | HSEDYTEQPFPFGGGMSTTTFSLRGLYDQYTKHMNRWT | |
| | | FSNDQLDLARYRGCKFRFYRHPTCDFIVHYNLVPPLKMN | |
| | | QFTSPNTHPGLLMLTKHKIIIPSFLTRPGGRRFVKIRLPPP | |
| | | KLFEDKWYTQQDLCKQPLVTLTATAASLRYPFCSPQTNN | |
| | | PNCTFQVLRKNYHKVIGTSSTNSEDVTPFENWLYNTASH | |
| | | YQTFATEAQVGRIPSFNPDGTKNTKESEWQNYWSKKGE | |
| | | PWNPNSSYPHTTTNQMYKIPFDSNYGFPTYKPIKEYMLQ | |
| | | RRAWSFKYETDNPVSKKIWPQPTTTKPTIDYYEYHAGWF | |
| | | SNIFIGPNRHSLQFQTAYVDTTYNPLNDKGKGNKIWFQY | |
| | | HSKVNTDLRDRGIYCLLEDMPLWSMTFGYSDYVSTQLGP | |
| | | NVDHETQGLVCIICPYTEPPMYDKTNPNSGYVAYDTNFG | |
| | | NGKMPSGRSQVPVYWQCRWRPMLWFQQQVLNDISKS | |
| | | GPYAYRDELKNCCLTAYYNFIFDWGGDMYYPQVIKNPCA | |
| | | DSGLVPGTSRFTREVQVVSPLSMGPQYILHLFDQRRGFF | |
| | | SSNALKRMQQQQEFDESFTVKPKRPKLSTAAHVEQQEE | |
| | | DSSSRERKSGSSQEEVQEEVLQTPEIQLHLQRNIREQLHI | |
| | | KQQLQLLLLQLFKTQANIHLNPRFISP* | |
| AF345522.1 | AAK11698.1 | MAWRRWRWRPWWRRRRRRRWRRRRRRPRRRRPYR | 248 |
| | | RRRPRRVRRRRGRWRRAYRRWGRRRRRRRHKKKLVLT | |
| | | QWQPAVVKRCLIVGFDPLIICGINRTIFNYTTHSEDFTFNN | |
| | | DSFGGGLCTAQYTLRILFQEKLAQHNFWSASNEDLDLAR | |
| | | YLGATIVLYRHPTVDFLVRIRTSPPFEDTDMTAMTLHPGM | |
| | | MMLAKKTIKIPSLKTRPSRKHVVRIRVGAPKLFEDKWYPQ | |
| | | NELCDVTLLTIQATTADFQYPFGSPLTNSPCCNFQVLNSN | |
| | | YDNAHSILNLSNEPTNKWHTYRNNCYKFLLEQYSYYNTK | |
| | | QVVAQLKYKWNPNQNPTMPNTSNASLSKKPDDLTKTKT | |
| | | TNEYPHWDTLYGGLAYGHSTVTPGTTSSPTDLKTQMLT | |
| | | GNEFYTTAGKKLIDTFHPIPYYENGSSKANTNIFDYYTGM | |
| | | YSSIFLSSGRSNPEVKGSYTDISYNPLTDKGVGNMIWIDW | |
| | | LTKGDTVYDPKKSKCLLSDFPLWSLCYGYPDYCRKQTG | |
| | | DSGIYYDYRVLIRCPYTYPQLIKHNDKYFGFVVYSENFGL | |
| | | GRLPGGNPNPPTRMRLHWYPNMFHQTEVLECIAQSGPF | |
| | | AYHGDERKAVLTAKYKFRWKWGGNPVFQQVLRDPCTG | |
| | | GAVAPHTSRHPRAIQVHDPKYQAPEYLFHKWDFRRGLF | |
| | | STKGIKRVSEQPVHDEYFTGSSKRPKKDTNPSPQGEEQK | |
| | | EGSRFRVPELRPWLPSSQETQSQSEQEETAPKTVQEQL | |
| | | QEQLQQQQLMGIQLRNVCLQLARVQAGHSLHPVFQCHA* | |
| AF345525.1 | AAK11704.1 | MAWGWWRRRRKWWWRRRFARSRLRRRRIRRPRRRTR | 249 |
| | | RRTVRRRRQWRRGRPRRRLFKRKRRFKRRRRKAKIKIT | |
| | | QWQPSSVKRCFVIGYFPLVICGPGRWSENFTSHIEDKISK | |
| | | GPFGGGHSTSRWSLKVLYEEFQRHHNFWTRSNKDLELV | |
| | | RFFGSSWRFYRHEDTDYIVYYSRKAPLGGNLLTAPSLHP | |
| | | GAAMLSKHKIVVPSFKTRPGGKPTVKINIKPPTTLIDKWYF | |
| | | QKDICDTTFLNLNVVLCNLRFPFCSPQTDNICVTFQILHEV | |
| | | YHNYISITAKELLTGTEWRQYYKNFLNAALPNDRSVNKLN | |
| | | TFSTEGAYSHPQIKKHTENITGSGDKYFRKKDGLWGDAI | |
| | | HITDQQNRTEVIDLILKNAENYLKKVQQEYQGQENLKNLI | |
| | | HPVFCQYVGIFGQPTTKLPQNKPRNSRPVQRHNI* | |
| AF345527.1 | AAK11708.1 | MSWWGWRRRWWWKPRRRWRRRRARRPRRLPRRRY | 250 |
| | | RRPTRRYRGRRVRRRRAGGWRGRRRYSRRYSRRLTVR | |
| | | RKKKKLTLKIWQPQNIRRCKIRGLLPLLICGHTRSAFNYAI | |
| | | HSDDKTPQQQSFGGGLSTVSFSLKVLFDPNQRGLNRWS | |
| | | ASNDQLDLARYTGCTFWFYRHKKTDFIVQYDVSAPFKLD | |
| | | KNSCPSYHPFMLMKAKHKVLIPSFDTKPKGREKIKLRIQP | |
| | | PKMFIDKWYTQEDLCPVILVTLVATAASFTHPFCSPQTAN | |
| | | PCITFQVLKEFYYQAMGYGTPETTMSTIWNTLYTTSTYW | |
| | | QSHLTPQFVRMPKNNPDNTANTEANKFNEWVDKTFKTG | |
| | | KLVKYNYNQYKPDIEKLTLLRQYYFRWETQHTGVAVPPT | |
| | | WTTPTTDRYEYHVGMFSPIFLTPYRSAGLDFPYAYADVT | |
| | | YNPLTDKGVGNRMWYQYNTKIDTQFDAKCCKCVLEDMP | |
| | | LYAMAFGHADFLEQEIGEYQDLEANGYVCVISPYTKPPM | |
| | | FNKHNPQQGYVFYDSQWGNGKWIDGTGFVPVYWLTRW | |
| | | RVELLFQKQVLSDLAMSGPFSYPDELKNTVLTAKYRFDF | |
| | | KWGGNLFHQQTIRNPCKPEETSTGRIPRDVQVVDPVTM | |
| | | GPRFVFHSWDWRRGFLSDRALKRMFEKPLDFEGFTATP | |
| | | KRPRILPPTEGQLAREQKEQEESSDSQEESSLTPLEEVP | |
| | | QETKLRLHLRKQLREQRSIRHQLRTMFQQLVKTQAGLHL | |
| | | NPLLSSQL* | |
| AF345528.1 | AAK11710.1 | MWNPSTIRACNIKGAINLVMCGHTQAGRNYAIRSEDFYP | 251 |
| | | QIQSFGGSFSTTTWSLRVLFDEYQKFHNFWTYPNTQLDL | |
| | | CRYKYAIFTFYRDPKVDYIVIYNTNPPFKINKYSSPFLHPG | |
| | | LMMLQKKKILIPSFQTKPGGKSRIKVKIKPPALFEDKWYTQ | |
| | | QDLCPVNLLSLAVSACSFIHPFCSPESDTICMTFQVLREF | |
| | | YYTHLTVTPTTTTSTPEKDKKIFNDQLYSNANFYQSLHAS | |
| | | AFLNIAQAPAIHGHNGIPNNSRYLSSTGTETSFRTGNNSIY | |
| | | GQPNYKPIPEKLTEIRKWFFKQATTPNEIHGTYGKPTYDA | |
| | | VDYHLGKYSPIFLSPYRTNTQFPTAYMDVTYNPNVDKGK | |
| | | GNKIWLQSVTKETSDFDSRSCRCIIENLPMWAMVNGYSD | |
| | | FAESELGSEVHAVYVCCIICPYTKPMLYNKTNPAMGYIFY | |
| | | DTLFGDGKLPSGPGLVPFYWQSRWYPKLAWQQQVLHD | |
| | | FYLCGPFSYKDDLKSFTINTTYKFKFLWGGNMIPEQVIKN | |
| | | PCKTTDPTYTLSDRQRRDLQVVDPITMGPQWEFHTWDW | |
| | | RRGLFGQNALRRVSEKPGDDAEYYAPPKKPRFFPPTDLE | |
| | | EQEKDSDSQEETRLLFHPSPPRSQEEIQQEQQRDIHLRL | |
| | | GQQLRIRQQLQQVFLQVLKTQANLHINPLFLNQQ* | |
| AF345529.1 | AAK11712.1 | MAWGWWRRWRRWPTRRWRRRRRRRPVRRTRARRPA | 252 |
| | | RRYRRRRTVRTRRRRWGRRRYRRGWRRRTYVRKGRH | |
| | | RKKKKRLVLRQWQPATRRRCTITGYLPIVFCGHTKGNKN | |
| | | YALHSDDYTPQGQPFGGALSTTSFSLKVLYDQHQRGLN | |
| | | KWSFPNDQLDLARYRGCKFYFYRTKQTDWVGQYDISEP | |
| | | YKLDKYSCPNYHPGNMIKAKHKFLIPSYDTNPRGRQKIIV | |
| | | KIPPPDLFVDKWYTQEDLCDVNLVSFAVSAASFLHPFGS | |
| | | PQTDNPCYTFQVLKEFYYQAIGFSATEEKIQNVFNILYEN | |
| | | NSYWESNITPFYVINVKKGSNTAQYMSPQISDADFRNKV | |
| | | NTNYNWYTYNAKTHKEKLKTLRQAYFKQLTSEGPQHTSS | |
| | | HAGYATQWTTPSTDAYEYHLGMFSTIFLAPDRPVPRFPC | |
| | | AYQDVTYNALMDKGVGNHVWFQYNTKADTQLILTGGSC | |
| | | KAHIENIPLWAAFYGYSDFIESELGPFVDAETVGLICVICP | |
| | | YTKPPMYNKTNPMMGYVFYDRNFGDGKWTDGRGKIEP | |
| | | YWQVRWRPEMLFQETVMADIVQTGPFSYKDELKNSTLV | |
| | | CKYKFYFTWGGNVMFQQTIKNPCKTDEQPTDSGRHPRG | |
| | | IQVADPEQMGPRWVFHSFDWRRGYLSEKALKRLQEKPL | |
| | | DYDEYFTQPKRPRMFPPTESAEGEFREPEKGSYSEEER | |
| | | SQASAEEQTKEATVLLLKRRLREQQQLQQQLQFLTREMF | |
| | | KTQAGLHLNPMLLNQR* | |
| AF371370.1 | AAK54731.1 | MRFSRIYRPKKGPLPLPLVRAEQKKQPSDMSWRPPLHN | 253 |
| | | GAGIERQFFEGCFRFHASCCGCGNFVTHITLLAARYGFT | |
| | | GGPTPPGGPGALPSLRRALPPPPAPQDQAEPELWRGRG | |
| | | GGGEGNAGGRAEGGDGEGYEPEELEELFRAAAADDE* | |
| AB060596.1 | BAB69916.1 | MAFRWWWWRRRPQRRWTRRRWRRLRTRRPRRTVRR | 254 |
| | | RRRRPRVRRRRWGRRRGRRRLYRRTYRKRRKRRKKMT | |
| | | LKMWNPSTIRACNIRGFIALVVCGHTRAGCNYAIHSEDYI | |
| | | PQLRPYGGSFSTTTWSLKLLFDEYLKFRNKWSYPNTELN | |
| | | LARYRGATFTFYRDPKVDYIVVYNTVPPFKLNKYSCPMLH | |
| | | PGMMMQYKKKVLIPSYQTKPKGKAKIRLRIKPPVLFEDK | |
| | | WYTQQDLCPVNLLSLAVSACSFLHPFIPPESDNICITFQVL | |
| | | RDFYYTQMSVTPTTTTSLNQKDEKIFSDHLYKNPEYWQS | |
| | | HHTAARLSTSQKPALRNKEEIPNDHGYLNTTPTDSTFRT | |
| | | GNNTIYGQPSYRPNYTKLTKIREWYFTQENTDNPIHGSYL | |
| | | KPTLNSVDYHLGKYSAIFLSPYRTNTQFDTAYQDVTYNPN | |
| | | TDKGKGNKIWIQSCTKESTILDNACRCVIEDMPLWAMVN | |
| | | GYLEFCDSELPGANIYNTYIVVVICPYTKPQLLNKTNPKQ | |
| | | GYVFYDTLFGDGKMPTGTGLVPFWLQSRWYPRAEFQQ | |
| | | QVLHDLYLTGPFSYKDDLKSFSFNAKYKFSFLWGGNMIP | |
| | | QQIIKNPCKKEESTFTYPSREPRDLQVVDPLTMGPEWVF | |
| | | HTWDWRRGLFGKNAVDRVSKKPDDDAEYYPVPKRPRF | |
| | | FPPTDTQSEPEKDFGFTPESQELQQEDLRAPQEESQEV | |
| | | QQQRLLQLRLSQQFRLRQQLQHLFVQVLKTQAGLHINPL | |
| | | FLNHA* | |
| AB060592.1 | BAB69900.1 | MAWTWWWQRRRRRWPWRRRRWRRLRTRRPRRLVRR | 255 |
| | | RRKRYRVRRRRRWGRRRGRRTYLRRRLKKRKRRKKLR | |
| | | LTQWNPSTIRGCTIKGMAPLIICGHTMAGNNFAIRMEDYV | |
| | | SQIRPFGGSFSTTTWSLKVLWDEHTRFHNTWSYPNTQL | |
| | | DLARFKGVNFYFYRDKDTDFIVTYSSVPPFKMDKYSSAM | |
| | | LHPGTLMQRKKKILIPSFTTRPRGRKKVKLHIKPPVLFEDK | |
| | | WYTQQDLCDVNLLSLAVSAASFRHPFCPPQTDNICITFQV | |
| | | LKDFYYTQMSVTPDTAGQEKDIEIFEKHLFKNPQFYQTVH | |
| | | TQGIISKTRRTAKFSTSNNTLGSDTNITPYLEQPTATNHKN | |
| | | TLSTGNNSIYGLPSYNPIPDKLKKIQEWFWKQETDKENLV | |
| | | TGSYQTPTNKSVSYHLGKYSPIFLSSYRTNLQFITAYTDV | |
| | | TYNPLNDKGKGNQIWVQYVTKPDTIFNERQCKCHIVDIPL | |
| | | WAAFHGYIDFIQSELGIQEEILNIAIIVVICPYTKPKLVHDPP | |
| | | NQNQGFVFYDTQFGDGKMPEGSGLVPIYYQNRWYPRIK | |
| | | FQSQVVHDFILTGPFSYKDDLKSTVLTVEYKFKFLWGGN | |
| | | MIPEQVIRNPCKTEGHDLPHTSRLHRDLQVVDPHTVGPQ | |
| | | WALHTWDWRRGLFGSEAIKRVSEQQVHDELYYPASKKP | |
| | | RFLPPISGLQEQERDYSSQEEKDQSSSEEEKDPKKKEQK | |
| | | QQQRLHLQFQEQQRLGNQLRLIFRELQKTQAGLHINPML | |
| | | SNRL* | |
| AB060593.1 | BAB69904.1 | MAWRWWWRRRWKPRRRPAWTKYRRRRWRRLRPRRP | 256 |
| | | RRLARGRRRRRTVRRRRVRRLRRRRGWTRRRYLRRRK | |
| | | RRKLILTQWNPNIVRRCSIKGIIPLTMCGANTASFNYGMH | |
| | | SDDSTPQPEKFGGGMSTVTFSLYVLYDQFTRHMNRWSY | |
| | | SNDQLDLARYRGCSFKLYRNPTTDFIVQYDNNPPMKNTIL | |
| | | SSPNTHPGMLMQQKHRILVPSWQTFPRGRKYVKVKIPPP | |
| | | KLFEDHWYTQPDLCKVPLVTLRSTAADFRHPFCSPQTNN | |
| | | PCTTFQVLRENYNEVLGLPYANTGSNNEVKIKIDNFENWL | |
| | | YNSSVHYQTFQTEQMFRPKQYNADGSTWKDYKSMLST | |
| | | WTSQIYNKKTDSNYGYASYDFSKGKEFATQMRQHYWVQ | |
| | | LTQLTATVPHIGPTYSNTTTPEYEYHAGWYSPVFIGPNRH | |
| | | NIQFRTAYMDVTYNPLNDKGQFNRVWFQYSTKPTTDFN | |
| | | NTQCKCVLENIPLWSALFGYSEYVESQLGPFQDHGTVGV | |
| | | VVVQCPYTVPPMYNKEKPDMGYVFYDTHFGNGKLGNGS | |
| | | GQVPRYWQMRWYPILKRQKQVMNDICKTGPFSYRDELL | |
| | | QVDLASPYTFRFNWGGDLLYHQVIKDPCSSSGLAPTDSS | |
| | | RFKRDVQVVSPLTMGPRLLFHSFDQRRGFFTPGAIKRMH | |
| | | DEQINVPDFTQKPKIPRIFPPVELRERAEAEEDSGSEKAS | |
| | | FTSSQEREAEAQEKLPIQLQLRQQLRQQQQLRVHLQQVF | |
| | | LQLQKTKAHLHINPLFLAQGNM* | |
| AB060595.1 | BAB69912.1 | MAYSYWWRRRRWPWRGRWRRWRRRRRIPRRRPRRP | 257 |
| | | VRRYRRRPVRRKRRWGRRGRRRRYTRRYRRRLTVRRK | |
| | | RNKLRLSVWQPQNIRYCAIKGLFPILICGHGKSAGNYAIHS | |
| | | DDFITSRFSFGGGLSTTSYSLKLLFDQNLRGLNRWTASN | |
| | | DQLDLARYLGAIFWFYRDQKTDYIVQYDISEPFKIDKDSS | |
| | | PSFHPGILMKSKHKVLVPSFQTWPKGRSKVKLKIKPPKM | |
| | | FVDKWYTQEDLCTVTLVSLVVSLASFQHPFCRPLTDNPC | |
| | | VTFQVLQNFYNNVIGYSSSDTLVDNVFTSLLYSKASFWQ | |
| | | SHLTPSYVKKINNNPDGSSISQRVGTMPDMTEYNKWVSN | |
| | | TNIGTGFVNSNVSVHYNYCQYNPNHTHLTTLRQYYFFWE | |
| | | THPAAANKTPVTHVPITTTKPTKDWWEYRLGLFSPIFLSP | |
| | | LRSSNIEWPFAYRDIIYNPLMDKGVGNMMWYQYNTKPDT | |
| | | QFSPTSCRAVLEDKPIWSMAYGYADFLLSILGEHDDVDF | |
| | | HGLVCIICPYTRPPLFDKDNPKMGYVFYDAKFGNGKWID | |
| | | GTGFIPVEFQSRWKPELAFRKDVLTDLAMSGPFSYSDDL | |
| | | KNTTIQAKYKFKFKWGGNLSYHQTIRNPCTSDGQTPTTS | |
| | | RQSREVQIVDPLTMGPRYVFHSWDWRRGWLNDRTLKR | |
| | | LFQKPLDFEEYPKSPKRPRIFPPTEQLQEDPQEQERDSS | |
| | | SSEESLPTSSEETPPAHLLRVHLRKQLRQQRDLRVQLRA | |
| | | LFAQVLKTQAGLHINPLLLAPQ* | |
| AB064596.1 | BAB79314.1 | TAWWWGRRWRRRPWGRWRRRRRVWRRRPRTAVRRR | 258 |
| | | RGRRYVSRRRRYRRRLRRRGRRRYRGRRKKRQTLVLK | |
| | | QWQPDVNRLCRITGWLPLIVCGTGRAQDNFIVHSEDITP | |
| | | RGAAYGGNLTHITWCLEAIYQEFLMHRNRWSRSNHDLDL | |
| | | CRYQGVVFKAYRHPKVDYILAYTRTPPFQATELSYMSCH | |
| | | PLLMLTAKHRIVVKSQETKKGGKKYVKFRIKPPRLMLNKW | |
| | | YFTHDFCKVPLFSMWASACDLRNPWLREGALSPTVGFF | |
| | | ALKPDFYPNLSILPNEVSQQFDFFLNSAHPPSIQSEKDVR | |
| | | WEYTYTNLMRPIYNQTPSLKASTYDWQNYSNPNNYQAC | |
| | | HQQFIAFKAQRFAKIKAEYQTVYPTLTTQTPQSEALTQEF | |
| | | GLYSPYYLTPTRISLDWHTVFHHIRYNPMADKGLGNMIW | |
| | | VDWCSRKEATYDPTRSKCMLKDLPLYMRFYGYCDWVTK | |
| | | SIGSETAWRDMRLMVVCPYTEPQLMKKNDKTWGYVIYG | |
| | | YNFANGNMPWLQPYIPISWFCRWFPCITHQREAMESVV | |
| | | ATGPFMVRDQDRNSWDITIGYKFLWRWGGSPLPTQAID | |
| | | DPCQQGTHPLPEPGTLPRILQVSDPTQLGPKTIFHLWDQ | |
| | | RRGLFSKRSIERMSEYKGTDDLFSPGRPKRPKLDTRPEG | |
| | | LPEEQRGAYNLLQALEDSAQSEESDQEEMPPLEEEQVL | |
| | | HEQKKEALLQQLQQQKHHQRVLKRGLRLLLGDVLKLRR | |
| | | GLHIDPVLT* | |
| AB064597.1 | BAB79318.1 | TAWWWGRWRRRWRRRRPWRPRLRRRRARRAFPRRR | 259 |
| | | RRRFVSRRWRRPYRRRRRRGRRRRRRRRRHKPTLVLR | |
| | | QWQPDVIRHCKITGRMPLIICGKGSTQFNYITHADDITPR | |
| | | GASYGGNFTNMTFSLEAIYEQFLYHRNRWSASNHDLELC | |
| | | RYKGTTLKLYRHPDVDYIVTYSRTGPFEISHMTYLSTHPL | |
| | | LMLLNKHHIVVPSLKTKPRGRKAIKVRIRPPKLMNNKWYF | |
| | | TRDFCNIGLFQLWATGLELRNPWLRMSTLSPCIGFNVLK | |
| | | NSIYTNLSNLPQHREDRLNIINNTLHPHDITGPNNKKWQY | |
| | | TYTKLMAPIYYSANRASTYDLLREYGLYSPYYLNPTRINLD | |
| | | WMTPYTHVRYNPLVDKGFGNRIYIQWCSEADVSYNRTK | |
| | | SKCLLQDMPLFFMCYGYIDWAIKNTGVSSLARDARICIRC | |
| | | PYTEPQLVGSTEDIGFVPITETFMRGDMPVLAPYIPLSWF | |
| | | CKWYPNIAHQKEVLEAIISCSPFMPRDQGMNGWDITIGYK | |
| | | MDFLWGGSPLPSQPIDDPCQQGTHPIPDPDKHPRLLQVS | |
| | | NPKLLGPRTVFHKWDIRRGQFSKRSIKRVSEYSSDDESL | |
| | | APGLPSKRNKLDSAFRGENPEQKECYSLLKALEEEETPE | |
| | | EEEPAPQEKAQKEELLHQLQLQRRHQRVLRRGLKLVFTD | |
| | | ILRLRQGVHWNPELT* | |
| AB064599.1 | BAB79326.1 | TAWWRYRRRPWRRWRRRRWGLRTRRPRRTFRRRRAR | 260 |
| | | RYVSRGRRRRYRRRRRRGRRRRGRRRRHRKTLIVRQW | |
| | | QPDVIKRCFITGWLPLIICGNGHTQFNFITHMDDIPPKNAS | |
| | | YGGNFTNLTFNLACFYDEFMHHRNRWSASNHDLELVRYI | |
| | | RTSLKLYRHESVDYIVCYTTTGPFETNEMSYMLTHPLAML | |
| | | LSKRHVVVPSLKTKPHGRKYKKITIKPPKLMLNKWYFATD | |
| | | LCHIGLFQLWATGLELRNPWLRSGTNSPVIGFYVLKNQV | |
| | | YKNRYSNLNTTEAHNARQDAWNELTQTKTNDKWYNWQ | |
| | | YTYNKLMKPIYYAASNESSNSAMKGKTYNWKHYKEYFSN | |
| | | TQTKWKTIIKDAYDLVREEYQQLYTTTMAYPPPWQSTTS | |
| | | NTGRQYLEHDCGIYSPYFLTPQIYSPEWHTAWSYIRYNPL | |
| | | TDKGIGNRVCVQYCSEASSDYNPIKSKCMLQDMPLWMM | |
| | | LYGYADYVVKSTGIQSAWTDMRVAIRCPYTDPKLVGSTE | |
| | | NTMFIPIGLEFMNGDIPDKRPYIPLTWWFKWYPMITHQKT | |
| | | AIEAIVSCSPFMPRDQEQASWDITVGYKATFLWGGSPLP | |
| | | PQPIDDPCQKGKHDIPDPDTNPPRIQISDPQHLGPATLFH | |
| | | SWDLRRGYINTKSIKRISEHLDANEYFSTGVVSKKPRFDT | |
| | | PHHGQLSNQEEDALSILRQPQKEQEETTSEEEQALQKEE | |
| | | EQKEKLLQQLRVQRQHQRVLRQGIKHLMGDVLRLRQGV | |
| | | HWNPVL* | |
| AB064600.1 | BAB79330.1 | TAWGWYRRRRWRPWRRRRWAIRRRRPRRTVRRRGRR | 261 |
| | | RYVSRWPRRRYRRRRRRTRRRGGRKRRHRQTLILRQW | |
| | | QPDVMKKCFITGWMPLIICGTGNTQFNFITHEDDVPPKGA | |
| | | SYGGNLTNLTFTLEGLYDEHLLHRNRWSRSNFDLDLSRY | |
| | | LYTIIKLYRHESVDYIVTYNRTGPFEISPLSYMNTHPMLML | |
| | | LNKHHVVVPSPKTKPKGKRAIKIKIKPPKLMLNKWYFARD | |
| | | TCRIGLFQLYATGANLTNPWLRSGTNSPVVGFYVIKNSIY | |
| | | QDAFDNLADTEHTNQRKNVFENKLYPTTTTNKDNWQYT | |
| | | YTSLMKNIYFKTKQEAENQTMSSTYNFDTYKTNYDKVRT | |
| | | KWIKIAEDGYKLVSKEYKEIYISTATYPPQWNSRNYLSHD | |
| | | YGIYSPYFLTPQRYSPQWHTAWTYVRYNPLTDKGIGNRI | |
| | | FVQWCSEKNSSYNSTKSKCMLQDMPLFMLTYGYLDYVL | |
| | | KCAGSKSAWTDMRVCIRSPYTEPQLTGNTDDISFVIISEA | |
| | | FMNGDMPYLAPHIPVSLWFKWYPMILHQKAALETIVSCG | |
| | | PFMPRDQEANSWDITAGYKAVFKWGGSPLPPQPIDDPY | |
| | | QKPTHEIPDPDKHPPRLQIADPKILGPSTVFHTWDIRRGL | |
| | | FSTASLKRVSEYQPPDDLFSTGVASKRPRFDTPVQGQLE | |
| | | SQEEESYRLLRALQKEQETSSSEEEQPQNQEIQEKLLLQ | |
| | | LQQQRQQQRLLAKGIKHLLGDVLRLRKGVHWDPVLT* | |
| AB064601.1 | BAB79334.1 | TAWYRRRRWRPWRRRRRPWTLRRRRARRFVRRRPRR | 262 |
| | | RYVSRWRRRRYRRRLRRGRRRRGRRRRKETIIVRQWQ | |
| | | PDVMRNCYITGFLPLIVCGSGNTQFNFITHENDIPPRGAS | |
| | | YGGNLTNITFTLAALYDQYLLHRNRWSRSNFDLDLARYIN | |
| | | TKLKLYRHDSVDYIVTYNRTGPFEVNPLTYMHTHPLLMLV | |
| | | NRHHIVVPSLKTKPRGKRYIKVKIKPPKLMLNKWYFAKDIC | |
| | | PLGLFQLYATGLELRNPWIREGTNSPIVGFYVLKPSLYNG | |
| | | AMSNLADTEHLNQRQTLFNKLLPTQNQKDEWQYTYNKP | |
| | | MQKIYYEAANKQDSGFKNTTYNWTNYKTNYQKVQSQW | |
| | | QTVAQQNYNQVYNEFKEVYPLTATWPPQWNARQYMSH | |
| | | DFGIYSPYFLSPARFTDYWHSAYTYVRYNPMSDKGIGNII | |
| | | CIQWCSEKNSEFNETKNKCILRDMPLYMLTYGYLDYTTK | |
| | | CTGSNSIWTDARVAIRCPYTDPPLSNPTNKNTLYIPLSTSF | |
| | | MQGDMPWPTTNIPLKMWFKWYPMIMHQRACLETIVSCG | |
| | | PFMPRDQTASSWDITIAYRAFFKWGGNPLPPQPIDDPCQ | |
| | | KDTHEIPDPDKHPRGIQISDPKVLGPPTVFHTWDIRRGLF | |
| | | SSTSLKRVSEYQPPDDPFSTGVVFKRPRLETQYKGTQET | |
| | | PEEDAYTLLKALQKEQESSSSEEELPQEEQEIQKTQLLKQ | |
| | | LQLQQQQQRILKRGIRHLFGDVLRLRKGVHSNPDLL* | |
| AB064602.1 | BAB79338.1 | TAWYRYRRRPWRRRRRPRWGLRRRRFRRSFRGRGRR | 263 |
| | | RYVSRWSRRRYRRRRRRGRRRRGRRRRKRQTLIPRQW | |
| | | QPDVTKKCFITGWMPLIICGTGHTQFNFITHEEDIPGAGA | |
| | | SYGGNLTNITITLGGLYEQYMLHRNHWSRSNYDLELARY | |
| | | LGFTLKCYRHATVDYILTYSRTTPFETNELSHMLTHPLLM | |
| | | LLNKHHRVIPSLKTRPKGKRSVRIHIKPPKLMINKWYFAKD | |
| | | LCNIGPCQIYATGLELSNPWLRSGTNSPVIGFWVLKNHLY | |
| | | DGNLSNIASGEQLTARQTLFTTKLLPSNNTKDEWQYAYT | |
| | | PLMKTFYTQAANTAAHNITDKTYNWKNYKTHYDKVQQT | |
| | | WTTKAQFNYDLVKEEYKTVYPTTATFPPEWSNRQYLEH | |
| | | DYGLFSPYFLTPNRYSTEWHMPITYVRYNPLADKGIGNRI | |
| | | YMQWCSESSSSFEPTKSKCMLQDMPLYMLTYGYLDYVV | |
| | | KCTGVKSAWTDMRVAIRSPYTFPQLIGSTDKVGFIPLGEK | |
| | | FMSGDTDPVKNFIPLKYWYRWYPFAANQKSVLETIVSCG | |
| | | PFMPRDQEAGSWDITVGYKATFKRGGSPLPPQPIDDPC | |
| | | QKPTHDLPDPDRHPPRIQISDPARLGPETLFHSWDIRRG | |
| | | YINTKAIKRISDYTESNDYFSTGVVSKRPRLETQYHGQHE | |
| | | SQEEDAYLLLKQLQEEQETSSSEGEQAPQEKTLQKEKLL | |
| | | KQLQLHKQQQQLLRKGIRHLLGDVLRLRRGVHWDPGL* | |
| AB064603.1 | BAB79342.1 | TAWWWGRWRQRRWGRRRRRPWRVRRRRPRRSFRRR | 264 |
| | | RRGRYVSRRRRRRYYRRRLRRGRRRGRRKRHRPTLILR | |
| | | QWQPDVVKHCKITGWMPLIICGSGSTQMNFITHMDDTPP | |
| | | MGYTYGGNFVNVTFSLEAIYEQFLYHRNRWSRSNHDLDL | |
| | | ARYQGTTLKLYRHATVDYILSYNRTGPFQISEMTYMSTHP | |
| | | AIMLLMKHRIVVPSLRTKPKGRRSIKIRIKPPKLMLNKWYF | |
| | | TKDICSMGLFQLMATGAELTNPWLRDTTKSPVIGFRVLKN | |
| | | SVYTNLSNLKDVSISGERKSILNKIHPETLTGSGNASKGW | |
| | | EYSYTKLMAPIYYSAVRNSTYNWQNYQTHCATTAIKFKE | |
| | | KQTSTLTLIKAEYLYHYPNNVTQVDFIDDPTLTHDFGIYSP | |
| | | YWITPTRISLDWDTPWTYVRYNPLSDKGIGNRIYAQWCS | |
| | | EKSSKLDTTKSKCILKDFPLWCMAYGYCDWVVKCTGVSS | |
| | | AWTDMRVAIICPYTEPALIGSDENVGFIPVSDTFCNGDMP | |
| | | FLAPYIPITWWIKWYPMITHQKEVLEAIVNCGPFVPRDQS | |
| | | SPAWEITMGYKMDWKWGGSPLPSQAIDDPCQKPTHELP | |
| | | DPDRHPRMLQVSDPTKLGPKTVFHKWDWRRGQLSKRSI | |
| | | KRVQEDSTDDEYVTGPLSRKRNKLDTKMPGPPTPEKES | |
| | | YTLLQALQESGQESSSQDEEQAPQKEENQKEALVEQLQ | |
| | | LQKQHQRVLKRGLKLLLGDVLRLRRGVHWDPLLS* | |
| AB064604.1 | BAB79346.1 | MAWGWWKRKRRWWWRKRWTRGRLRRRWPRRSRRR | 265 |
| | | PRRRRVRRRRRWRRGRPRRRLYRRGRRYRRKRKRAKI | |
| | | TIRQWQPAMTRRCFIRGHMPALICGWGAYASNYTSHLED | |
| | | KIVKGPYGGGHATFRFSLQVLCEEHLKHHNYWTRSNQD | |
| | | LELALYYGATIKFYRSPDTDFIVTYQRKSPLGGNILTAPSL | |
| | | HPAEAMLSKNKILIPSLQTKPKGKKTVKVNIPPPTLFVHKW | |
| | | YFQKDICDLTLFNLNVVAADLRFPFCSPQTDNVCITFQVL | |
| | | AAEYNNFLSTTLGTTNESTFIENFLKVAFPDDKPRHSNILN | |
| | | TFRTEGCMSHPQLQKFKPPNTGPGENKYFFTPDGLWGD | |
| | | PIYIYNNGVQQQTAQQIREKIKKNMENYYAKIVEENTIITKG | |
| | | SKAHCHLTGIFSPPFLNIGRVAREFPGLYTDVVYNPWTDK | |
| | | GKGNKIWLDSLTKSDNIYDPRQSILLMADMPLYIMLNGYID | |
| | | WAKKERNNWGLATQYRLLLTCPYTFPRLYVETNPNYGY | |
| | | VPYSESFGAGQMPDKNPYVPITWRGKWYPHILHQEAVIN | |
| | | DIVISGPFTPKDTKPVMQLNMKYSFRFTWGGNPISTQIVK | |
| | | DPCTQPTFEIPGGGNIPRRIQVINPKVLGPSYSFRSFDLR | |
| | | RDMFSGSSLKRVSEQQETSEFLFSGGKRPRIDLPKYVPP | |
| | | EEDFNIQERQQREQRPWTSESESEAEAQEETQAGSVRE | |
| | | QLQQQLQEQFQLRRGLKCLFEQLVRTQQGVHVDPCLV* | |
| AB064606.1 | BAB79354.1 | MAWGWWKRRRRWWFRKRWTRGRLRRRWPRSARRRP | 266 |
| | | RRRRVRRRRRWRRGRPRRRLYRRYRRKKRRRRKPKTV | |
| | | LKQWQPDITKRCYIIGYIPAIICGAGTWSHNYTSHLLDIIPK | |
| | | GPFGGGHSTMRFSLKVLFEEHLRHLNFWTRSNQDLELV | |
| | | RYFRCSFRFYRDQHTDYLVHYSRKTPLGGNRLTAPSLHP | |
| | | GVQMLSKNKIIVPSYDTKPKGKSYVKVTIAPPTLLTDKWY | |
| | | FSKDICDTTLVNLDVVLCNLRFPFCSPQTDNPCITFSVLHS | |
| | | IYNDFLSIVDTGNYKTQFVSNLSTKVGTDWGKRLNTFRTE | |
| | | GCYSHPKLPKKAVTPGNDKTYFTVPDGLWGDAVFNAEA | |
| | | SNIITKNMESYSESAKARGVQGDPAFCHLTGIYSPPWLTP | |
| | | GRISPETPGLYTDVTYNPYADKGVGNRIWVDYCSKKGNK | |
| | | YDNTSKCLLEDMPLWMVTFGYVDWVKKETGNWGIPLWA | |
| | | RVLIRCPYTVPKLYNEADPNYGWVPYSYYFGEGKMPNG | |
| | | DLYVPFKIRMKWYPSMWNQEPVLNDLAKSGPFAYKDTK | |
| | | TSVTVTAKYKFTFNFGGNPVPSQIVQDPCTQSTYDIPGTG | |
| | | NLPRRIQVIDPKVLGPHYSFHRWDFRRGLFGQQAIKRVS | |
| | | EQPTTSEFLFSGPKRPRIDQGPYIPPEKGSDSLQRESRP | |
| | | WSNSETEAETEAPSEEEPENQEEQVLQLQLRQQLREQR | |
| | | KLRQGIQCLFEQLITTQQGVHKNPLLE* | |
| DQ186994.1 | ABD34286.1 | MAWSWWWRRRKRWWPRRRRRWRRFRTRRARRAVPR | 267 |
| | | RRRRRRVRRRRWGRRRRRRRVFYKRRRRKTGRLYRKP | |
| | | KKKLVLTQWHPTTVRNCSIRGLVPLVLCGHTQGGRNFAL | |
| | | RSDDYPKQGSPYGGSFSTTTWNLRVLFDEHQKHHNTW | |
| | | SYPNNQLDLGRYKGCTFYFYRDKKTDYIVKFQRRGPFKI | |
| | | NKYSSPMAHPGMMMLDKMKILVPSFDTRPGGRRRVKVT | |
| | | IRPPTLLEDKWYTQQDLAPVNLVSLVVSAASFIHPFSQPQ | |
| | | TNNICTTFQVLKDMYYDCIGINSTLTTKYENLFNKLYSKCC | |
| | | YFETFQTIAQLNPGFKAAKKTTNGSGSTAATLGDAVTELK | |
| | | NPNGTFYTGNNSTFGCCTYKPTKEIGSNANKWFWHQLT | |
| | | ATDSDTLGQYGRASIKYMEYHTGIYSSIFLSPLRSNLEFPT | |
| | | AYQDVTYNPLTDRGIGNRIWYQYSTKENTTFNETQCKCV | |
| | | LSDLPLWSMFYGYVDFIESELGISAEIHNFGIVCVQCPYTF | |
| | | PPMFDKSKPDKGYVFYDTLFGNGKMPDGSGHVPTYWQ | |
| | | QRWWPRFSFQRQVMHDIILTGPFSYKDDSVMTGITAGYK | |
| | | FKFSWGGDMVSEQVIKNPERGDGRDSTYPDRQRRDLQ | |
| | | VVDPRSMGPQWVFHTFDYRRGLFGKDAIKRVSEKPTDP | |
| | | DYFTTPYKKPRFFPPTAGEEKLQEEDSALQEKRSPLSSE | |
| | | EGQTRAQVLQQQVLQSELQQQQELGEQLRFLLREMFKT | |
| | | QAGIHMNPRAFQEL* | |
| DQ186995.1 | ABD34288.1 | MAWSWWWRRRKRWWPRRRRRWRRFRTRRARRAVPR | 268 |
| | | RRRRRRVRRRRWGRRRRRRRVFYKRRRRKTGRLYRKP | |
| | | KKKLVLTQWHPTTVRNCSIRGLVPLVLCGHTQGGRNFAL | |
| | | RSDDYPKQGSPYGGSFSTTTWNLRVLFDEHQKHHNTW | |
| | | SYPNNQLDLGRYKGCTFYFYRDKKTDYIVKFQRRGPFKI | |
| | | NKYSSPMAHPGMMMLDKMKILVPSFDTRPGGRRRVKVT | |
| | | IRPPTLLEDKWYTQQDLAPVNLVSLVVSAASFIHPFSQPQ | |
| | | TNNICTTFQVLKDMYYDCIGINSTLTTKYENLFNKLYSKCC | |
| | | YFETFQTIAQLNPGFKAAKKTTNGSGSTAATLGDAVTELK | |
| | | NPNGTFYTGNNSTFGCCTYKPTKEIGSNANKWFWHQLT | |
| | | ATDSDTLGQYGRASIKYMEYHTGIYSSIFLSPLRSNLEFPT | |
| | | AYQDVTYNPLTDRGIGNRIWYQYSTKENTTFNETQCKCV | |
| | | LSDLPLWSMFYGYVDFIESELGISAEIHNFGIVCVQCPYTF | |
| | | PPMFDKSKPDKGYVFYDTLFGNGKMPDGSGHVPTYWQ | |
| | | QRWWPRFSFQRQVMHDIILTGPFSYKDDSVMTGITAGYK | |
| | | FKFSWGGDMVSEQVIKNPERGDGRDSTYPDRQRRDLQ | |
| | | VVDPRSMGPQWVFHTFDYRRGLFGKDAIKRVSEKPTDP | |
| | | DYFTTPYKKPRFFPPTAGEEKLQEEDSALQEKRSPLSSE | |
| | | EGQTRAQVLQQQVLQSELQQQQELGEQLRFLLREMFKT | |
| | | QAGIHMNPRAFQEL* | |
| DQ186996.1 | ABD34290.1 | MAWGWWRWRRRWPARRWRRRRRRRPVRRTRARRPA | 269 |
| | | RRYRRRRTVRTRRRRWGRRRYRRGWRRRTYVRKGRH | |
| | | RKKKKRLILRQWQPATRRRCTITGYLPIVFCGHTKGNKNY | |
| | | ALHSDDYTPQGQPFGGALSTTSFSLKVLFDQHQRGLNK | |
| | | WSFPNDQLDLARYRGCKFYFYRTKQTDWIGQYDISEPYK | |
| | | LDKYSCPNYHPGNMIKAKHKFLIPSYDTNPRGRQKIIVKIP | |
| | | PPDLFVDKWYTQEDLCSVNLVSLAVSAASFLHPFGSPQT | |
| | | DNPCYTFQVLKEFYYQAIGFSATDQQREKVFDILYKNNSY | |
| | | WESNITPFYVINVKKGSNTTQYMSPQISDSSFRKKVNTNY | |
| | | NWYTYDAKTNASQLKQLRNAYFKQLTSEGPQHTYSDNG | |
| | | YASQWTTPSTDAYEYHLGMFSTIFLAPDRPVPRFPCAYQ | |
| | | DVTYNPLMDKGVGNHVWFQYNTKADTQLIVTGGSCKAHI | |
| | | QDIPLWAAFYGYSDFIESELGPFVDADTVGLICVICPYTKP | |
| | | PMYNKTNPMMGYVFYDRNFGDGKWTDGRGKIEPYWQV | |
| | | RWRPEMLFQETVMADIVQTGPFSYKDELKNSTLVCKYKF | |
| | | YFTWGGNMMFQQTIKNPCKTDGQPTDSSRHPRGIQVAD | |
| | | PEQMGPRWVFHSFDWRRGYLSEKALKRLQEKPLDYDEY | |
| | | FTQPKRPRIFPPTESAEGEFREPEKGSYSEEERSQASAE | |
| | | EQTEEATVLLLKRRLREQQQLQQQLQFLTREMFKTQAGL | |
| | | HINPMLLNQR* | |
| DQ186997.1 | ABD34292.1 | MAWGWWRWRRRWPARRWRRRRRRRPVRRTRARRPA | 270 |
| | | RRYRRRRTVRTRRRRWGRRRYRRGWRRRTYVRKGRH | |
| | | RKKKKRLILRQWQPATRRRCTITGYLPIVFCGHTKGNKNY | |
| | | ALHSDDYTPQGQPFGGALSTTSFSLKVLFDQHQRGLNK | |
| | | WSFPNDQLDLARYRGCKFYFYRTKQTDWIGQYDISEPYK | |
| | | LDKYSCPNYHPGNMIKAKHKFLIPSYDTNPRGRQKIIVKIP | |
| | | PPDLFVDKWYTQEDLCSVNLVSLAVSAASFLHPFGSPQT | |
| | | DNPCYTFQVLKEFYYQAIGFSATDEQREKVFDILYKNNSY | |
| | | WESNITPFYVINVKKGCNTTQYMSPQISDSSFRKKVNTNY | |
| | | NWYTYDAKTNASQLKQLRNAYFKQLTSEGPQHTYSDNG | |
| | | YASQWTTPSTDAYEYHLGMFSTIFLAPDRPVPRFPCAYQ | |
| | | DVTYNPLMDKGVGNHVWFQYNTKADTQLIVTGGSCKAHI | |
| | | QDIPLWAAFYGYSDFIESELGPFVDADTVGLICVICPYTKP | |
| | | PMYNKTNPMMGYVFYDRNFGDGKWTDGRGKIEPYWQV | |
| | | RWRPEMLFQETVMADIVQTGPFSYKDELKNSTLVCKYKF | |
| | | YFTWGGNMMFQQTIKNPCKTDGQPTDSSRHPRGIQVAD | |
| | | PEQMGPRWVFHSFDWRRGYLSEKALKRLQEKPLDYDQ | |
| | | YFTQPKRPRIFPPTESAEGEFREPEKGSYSEEERLQASA | |
| | | EEQTEEATVLLLKRRLREQQQLQQQLQFLTREMFKTQAG | |
| | | LHINPMLLNQR* | |
| DQ186998.1 | ABD34294.1 | MAWGWWRWRRRWPARRWRRRRRRRPVRRTRARRPA | 271 |
| | | RRYRRRRTVRTRRRRWGRRRYRRGWRRRTYVRKGRH | |
| | | RKKKKRLILRQWQPATRRRCTITGYLPIVFCGHTKGNKNY | |
| | | ALHSDDYTPQGQPFGGALSTTSFSLKVLFDQHQRGLNK | |
| | | WSFPNDQLDLARYRGCKFYFYRTKQTDWIGQYDISEPYK | |
| | | LDKYSCPNYHPGNMIKAKHKFLIPSYDTNPRGRQKIIVKIP | |
| | | PPDLFVDKWYTQEDLCSVNLVSLAVSAASFLHPFGSPQT | |
| | | DNPCYTFQVLKEFYYQAIGFSATDEQREKVFDILYKNNSY | |
| | | WESNITPFYVINVKKGCNTTQCMSPQISDSSFRKKVNTN | |
| | | YNWYTYDAKTNASQLKQLRNAYFKQLTSEGPQHTYSDN | |
| | | GYASQWTTPSTDAYEYHLGMFSTIFLAPDRPVPRFPCAY | |
| | | QDVTYNPLMDKGVGNHVWFQYNTKADTQLIVTGGSCKA | |
| | | HIQDIPLWAAFYGYSDFIESELGPFVDADTVGLICVICPYT | |
| | | KPPMYNKTNPMMGYVFYDRNFGDGKWTDGRGKIEPYW | |
| | | QVRWRPEMLFQETVMADIVQTGPFSYKDELKNSTLVCKY | |
| | | KFYFTWGGNMMFQQTIKNPCKTDGQPTDSSRHPRGIQV | |
| | | ADPEQMGPRWVFHSFDWRRGYLSEKALKRLQEKPLDY | |
| | | DQYFTQPKRPRIFPPTESAEGEFREPEKGSYSEEERSQA | |
| | | SAEERTEEATVLLLKRRLREQQQLQQQLQFLTREMFKTQ | |
| | | AGLHINPMLLNQR* | |
| DQ186999.1 | ABD34296.1 | MAWRWWKRRRRWWFRKRWTRGRLRRRWPRPARRRP | 272 |
| | | RRRRVRRRRRWRRGRPRRRLYRRYRRKKRRRRKPKIIL | |
| | | KQWQPDIVKRCYIVGYIPAIICGAGTWSHNYTSHLLDIIPK | |
| | | GPFGGGHSTMRFSLKVLSEEHLRHLNFWTKSNQDLELIR | |
| | | YFRCSFKFYRDQDTDYIVHYSRKTPLGGNRLTAPNLHPG | |
| | | VQMLSKNKIIVPSYATKPKGPSYIKVTIAPPTLLTDKWYFS | |
| | | KDVCDTTLVNLDVVLCNLRFPFCSPQTDNPCITFQVLHSI | |
| | | YNDFLSIVDTNNYKESFVSALPTKVSTDWGKRLNTFRTE | |
| | | GCYSHPKLHKKAVTAATDTEYFTKPDGLWGDTIFDVENG | |
| | | QKIIKNMESYAKSAKERGINGDPAFCHLTGIYSPPWLTPG | |
| | | RISPETPGLYTDVTYNPYADKGVGNRIWVDYCSKKGNKY | |
| | | DNTSKCLLEDMPLWMVCFGYVDCVKKETGNWGIPLWAR | |
| | | VLIRSPYTVPKLYNEADPNYGWVPIFYYFGEGKMPNGDM | |
| | | YIPFKIRMKWYPSMWNQEPVLNDLAKSGPFAYKNTKTSV | |
| | | TVTAKYKFTFNFGGNPVPSQIVQDPCTQPTYDIPGTGNLP | |
| | | RRIQVIDPKVLSPHYSFHRWDFRRGLFGSQAIKRVSEQS | |
| | | TTSEFLFSGPKKPRIDQGPYIPPEKGSGSLQREPRPWSS | |
| | | SETEAETEAPSEEEPENQEEQVLQLQLRQQLREQRKLR | |
| | | QGIQCLFEQLITTQQGVHKNPLLE* | |
| DQ187000.1 | ABD34298.1 | MAWRWWKRRRRWWFRKRWTRGRLRRRWPRPARRRP | 273 |
| | | RRRRVRRRRRWRRGRPRRRLYRRYRRKKHRRRKPKIIL | |
| | | KQWQPDIVKRCYIVGYIPAIICGAGTWSHNYTSHLLDIIPK | |
| | | GPFGGGHSTMRFSLKVLFEEHLRHLNFWTKSNQDLELIR | |
| | | YFRCSFKFYRDQDTDYIVHYSRKTPLGGNRLTAPNLHPG | |
| | | VQMLSKNKIMVPSYATKPKGPSYIKVTIAPPTLLTDKWYF | |
| | | SKDVCDTTLVNLDVVLCNLRFPFCSPQTDNPCITFQVLHS | |
| | | IYNDFLSIVDTNNYKESFVSALPTKVSTDWGKRLNTFRTE | |
| | | GCYSHPKLHKKAVTAATDTEYFTKPDGLWGDTIFDVENG | |
| | | QKIIKNMESYAKSAKERGINGDPAFCHLTGIYSPPWLTPG | |
| | | RISPETPGLYTDVTYNPYADKGVGNRIWVDYCSKKGNKY | |
| | | DNTSKCLLEDMPLWMVCFGYVDWVKKETGNWGIPLWA | |
| | | RVLIRSPYTVPKLYNEADPNYGWVPISYYFGEGKMPNGD | |
| | | MYIPFKIRMKWYPSMWNQEPVLNDLAKSGPFAYKNTKTS | |
| | | VTVTAKYKFTFNFGGNPVPSQIVQDPCTQPTYDIPGTGNL | |
| | | PRRIQVIDPKVLGPHYSFHRWDFRRGLFGSQAIKRVSEQ | |
| | | STTSEFLFSGPKKPRIDQGPYIPPEKGSGSLQREPRPWS | |
| | | SSETEAETEAPSEEEPENQEEQVLQLQLRQQLREQRKLR | |
| | | QGIQCLFEQLITTQQGVHKNPLLE* | |
| DQ187001.1 | ABD34300.1 | MARRWWKRRRRWWFRKRWTRGRLRRRWPRPARRRP | 274 |
| | | KRRRVRRRRRWRRGRPRRRLYRRYRRKKRRRRKPKIIL | |
| | | KQWQPDIVKRCYIVDYIPAIICGAGTWSRNYTSHLLDIIPK | |
| | | GPFGGGHSTMRFSLKVLFEEHLRHLNFWTKSNQDLELIR | |
| | | YFRCSFKFYRDQDTDHIVHYSRKTPLGGNRLTAPNLHPG | |
| | | VQMLSKNKIIVPSYATKPKGPSYIKVTIAPPTLLTDKWYFS | |
| | | KDVCDTTLVNLDVVLCNLRFPFCSPQTDNPCITFQVLHSI | |
| | | YNDFLSIVDTNNYKESFVAALPTKVSTDWGKRLNTFRTE | |
| | | GCYSHPKLHKKAVTAATDTEYFTKPDGLWGDTIFDVENG | |
| | | QKIIKNMESYAKSAKERGINGDPAFCHLTGIYSPPWLTPG | |
| | | RISPETPGLYTDVTYNPYADKGVGNRIWVDYCSKKGNKY | |
| | | GNTSKCLLEDMPLWMVCFGYVDWVKKETGNWGIPLWA | |
| | | RVLIRSPYTVPKLYNEADPNYGWVPISYYFGEGKMPNGD | |
| | | MYVPFKIRMKWYPSMWNQEPVLNDLAKSGPFAYKNTKT | |
| | | SVTVTAKYKFTFNFGGNPVPSQIVQDPCTQPTYDIPGTG | |
| | | NLPRRIQVIDPKVLGPHYSFHRWDFRRGLFGSQAIKRVS | |
| | | EQSTTSEFLFSGPKKPRIDQGPYIPPEKGSGSLQREPRP | |
| | | WSSSETEAETEAPSEEEPENQEEQVLQLQLRQQLREQR | |
| | | KLRQGIQCLFEQLITTQQGVHKNPLLE* | |
| DQ187002.1 | ABD34302.1 | MAWRWWKRRRRWWFRKRWTRGRLRRRWPRPARRRP | 275 |
| | | KRRRVRRRRRWRRERPRRRLYRRYRRKKRRRRKPKIIL | |
| | | KQWQPDIVKRCYIVGYIPAIICGAGTWSHNYTSHLLDIIPK | |
| | | GPFGGGHSTMRFSLKVLFEEHLRHLNFWTKSNQDLELIR | |
| | | YFRCSFKFYRDQDTDYIVHYSRKTPLGGNRLTAPNLHPG | |
| | | VQMLSKNKIIVPSYATKPKGPSYIKVTIAPPTLLTDKWYFS | |
| | | KDVCDTTLVNLDVVLCKLRFPFCSPQTDNPCITFQVLHSI | |
| | | YNDFLSIVDTNNYKESFVAALPTKVSTDWGKRLNTFRTE | |
| | | GCYSHPKLHKKAVTAATDTEYFTKPDGLWGDTIFDVENG | |
| | | QKIIKNMESYAKSAKERGINGDPAFCHLTGIYSPPWLTPG | |
| | | RISPETPGLYTDVTYNPYADKGVGDRIWVDYCSKKGNKY | |
| | | DNTSKCLLEDMPLWMVCFGYVDWVKKETGNWGIPLWA | |
| | | RVLIRSPYTVPKLYNEADPNYGWVPISYYFGEGKMPNGD | |
| | | MYVPFKIRMKWYPSMWNQEPVLNDLAKSGPFAYKNTKT | |
| | | SVTVTAKYKFTFNFGGNPVPSQIVQNPCTQPTYDIPGTG | |
| | | NLPRRTQVIDPKVLGPHYSFHRWDFRRGLFGSQAIKRVS | |
| | | EQSTTSEFLFSGPKKPRIDQGPYIPPEKGSGSLQREPRP | |
| | | WSSSETEAETEAPSEEEPENQEEQVLQLQLRQQLREQR | |
| | | KLRQGIQCLFEQLITTQQGVHKNPLLE* | |
| DQ187004.1 | ABD34305.1 | MAWGWWKRRRRRWWRGLWRRRRFARRRPRRPARRP | 276 |
| | | RRRRVRRRRRWRRGRLRRRVYNRRRRIRRKRRRQKLTI | |
| | | RQWQPDKRRICRIKGYLPAIIYGDGTFSKNYTSHLEDRIS | |
| | | KGPFGGGHGTARMSLKVLYDDHLKGLNIWTYSNKDLELV | |
| | | RYMHTTITFYRHPDTDFIAVYNRKTPLGGNRYTAPSLHPG | |
| | | NMMLQRTKILIPSFKTKPRGSGKIRVVIKPPTLLVDKWYFQ | |
| | | KDICDVTLFNLNITAASLRFPFCSPQTNNPCVTFQVLHSV | |
| | | YDKALGINTFGTKETPEDQQMEDIKNWLTKALNTAGFTVL | |
| | | NTFRTEGIYSHPQLKKPPEGSNKPSAEQYFAPLDSLWGD | |
| | | KIYVNNNTSPSQTEATIPGILARNACTYYQKAKTSTLRQHL | |
| | | GAMAHCHLTGIFNPALLTQGRLSPEFFGLYKEIIYNPYDD | |
| | | KGKGNRIWIDPLTKPDNIFDARSKVELEDMPLWMACFGY | |
| | | NDWCKKELNNWGLEVEYRVLLRCPYTYPKLYNDANPNY | |
| | | GYVPISYNFSAGKTVEGDLYVPIMWRTKWHPTMYNQSP | |
| | | VLEDLAMAGPFAPKEKIPSSTLTIKYKAKFIFGGNPISEQIV | |
| | | KDPCTQPTYEIPGGGTLPRRIQVINPEYIGPHYSFKSFDIR | |
| | | RGYFSAKSVKRVSEQSDITEFIFSGPKKPRIDQDRYQEAE | |
| | | EHSDSRLREEKPWESSQETESEAQEEEIQETNIQLQLQH | |
| | | QLKEQLQLRRGIQCLFEQLTKTQQGVHINPSLV* | |
| DQ187005.1 | ABD34307.1 | MSLKVLYDDHLKGLNIWTYSNKDLELVRYMHTTITFYRHP | 277 |
| | | DTDFIAVYNRKTPLGGNRYTAPSLHPGNMMLQRTKILIPS | |
| | | FKTKPRGSGKIRVVIKPPTLLVDKWYFQKDICDVTLFNLNI | |
| | | TAASLRFPFCSPQTNNPCVTFQVLHSVYDKALGINTFGTK | |
| | | ETPEDQQMEDIKNWLTKALNTAGFTVLNTFRTEGIYSHP | |
| | | QLKKPPEGSNKPSAEQYFAPLDSLWGDKIYVNNNTSPSQ | |
| | | TEATIPGILARNACTYYQKAKTSTLRQHLGAMAHCHLTGI | |
| | | FNPALLTQGRLSPEFFGLYKEIIYNPYDDKGKGNRIWIDPL | |
| | | TKPDNIFDARSKVELEDMPLWMACFGYNDWCKKELNNW | |
| | | GLEVEYRVLLRCPYTYPKLYNDANPNYGYVPISYNFSAG | |
| | | KTVEGDLYVPIMWRTKWYPTMYDQSPVLEDLAMAGPFA | |
| | | PKEKIPSSTLTIKYKAKFIFGAILYLNRLSRTPAPSPPTKFP | |
| | | EAVRSLAEYKSLTRNTSGHTTHSKASTSDVGTLARRVLK | |
| | | ECQNNQTLLSLYSQVQKSQGSTKTGTKKQKNTQILDSEK | |
| | | RNRGRARKKQRAKPKKKRYKRQTSSSSCSTSSKSNCSS | |
| | | DGESSASSSN* | |
| DQ361268.1 | ABD61942.1 | MAWRWWWRRRRPWRWRWRRRRRPARRRRRRRPAR | 278 |
| | | RARRPRVRRWRRRRVWAPRPYIRRRRRSFRRKKIKITQ | |
| | | WNPAVTKKCTVTGYLPVIYCGTGDIGTTFQNFGSHMNEY | |
| | | KQYNAAGGGFSTMLFTMQNLYEEYQKHRCRWSKSNQD | |
| | | LDLCRYLDCKLTFYRSPNTDFIVGYNRKPPFIDTQITRCTL | |
| | | HPGMLIQERKKVIIPSFQTRPKGRIKRKIKVRPPTLFTDKW | |
| | | YFQRDLCKVPLVTVSASAASLRFPFGSPQTENYCIYFQVL | |
| | | DPWYHTRLSITGGKPAEYWTQLKAYLTQGWGRSTNNAG | |
| | | YQHGPLGTYFNTLKTSEHIRQPPADNYKQANKDTTYYGR | |
| | | VDSHWGDHVYQQTIIQAMEENQSNMYTKRALHTFLGSQ | |
| | | YLNFKSGLFSSIFLDNARLSPDFKGMYQEVVYNPFNDRG | |
| | | VGNKVWVQWCTNEDTIFKDLPGRVPVVDLPLWCALMGY | |
| | | SDYCKKYFHDDGFLKEARITIISPYTNPPLINNKNTNEGFV | |
| | | PYSFYFGKGRMPDGNGYIPIDFRFNWYPCIFHQTNWIND | |
| | | MVQCGPFAYHGDEKNCSLTMKYKFKFLFGGNPISQQTIK | |
| | | DPCQQPDWQLPGSGRFPRDVQVSNPRLQTEGSTFHAW | |
| | | DFRRGFYGKRAIERLQGQQDDVTYIAGPPKRPRFEVPAL | |
| | | AAEGSSNTRRSELPWQTSEEESSQEENSEETEEETSLS | |
| | | QQLKQQCIEQKLLKRTLHQLVKQLVKTQYHLHAPIIH* | |
| EF538879.1 | ABU55887.1 | MAWRWWKRRRRWWFRKRWTRGRLRRRWPRPARRRP | 279 |
| | | RRRRVRRRRRWRRGRPRRRLYRRYRRKKRRRRKPKIIL | |
| | | KQWQPDIVKRCYIIGYIPAIICGAGTWSHNYTSHLLDIIPKG | |
| | | PFGGGHSTMRFSLKVLFEEHLRHLNFWTKSNQDLELIRY | |
| | | FRCSFKFYRDQDTDYIVHYSRKTPLGGNRLTAPSLHPGV | |
| | | QMLSKNKILVPSYATKPKGGSYVKVTIAPPTLLTDKWYFS | |
| | | KDVCDTTLVNLDVVLCNLRFPFCSPQTDNPCITFQVLHSY | |
| | | YNDYLSIVDTALYKTSFVNNLSTKLGTTWANRLNTFRTEG | |
| | | CYSHPKLLKKTVTAANDTKYFTTPDGLWGDAVFDVSDAK | |
| | | KLTKNMESYAASANERGVQGDPAFCHLTGIFSPPWLTPG | |
| | | RISPETPGLYTDVTYNPYADKGVGNRIWVDYCSKKGNKY | |
| | | DNTSKCVLEDMPLWMLCFGYVDWVKKETGNWGIPLWA | |
| | | RVLIRSPYTVPKLYHENDPDYGWVPISYYFGEGKMPNGD | |
| | | MYVPFKVRMKWYPSMWNQEPVLNDLAKSGPFAYKNTK | |
| | | TSVTVTAKYKFTFNFGGNPVPSQIVQDPCTQPTYDIPGTG | |
| | | NLPRRIQVIDPKVLGPHYSFHRWDFRRGLFGTQAIKRVSE | |
| | | QSTTSEFLFSGPKKPRIDQGPYIPPEKGSGSLQRESRPW | |
| | | SSSETEAETEAPSEEEPENQEEQVLQLQLRQQLREQRKL | |
| | | RQGIQCLFEQLITTQQGVHKNPLLE* | |
| EU305675.1 | ABY26045.1 | MAWWGRWRRWRWRPRRWRRRRRRRVPRRRAQRSV | 280 |
| | | RRRRARRVRRRRWGRRRWRRGYRRRLRLRRKRKRKR | |
| | | RLVLTQWHPAKVRRCRISGVLPMILCGAGRSSFNYGLHS | |
| | | DDFTKQKPNNQNPHGGGMSTVTFNLKVLFDQYERFMNK | |
| | | WSYPNDQLDLARYKGCKFTFYRHPEVDFLAQYDNVPPM | |
| | | KMDELTAPNTHPALLLQSRHRVKIYSWKTRPFGSKKVTV | |
| | | KIGPPKLFEDKWYSQSDLCKVSLVSWRLTACDFRFPFCS | |
| | | PQTDNPCVTFQVLGEQYYEVFGTSVLDVPASYNSQITTF | |
| | | EQWLYKKCTHYQTFATDTRLAPQKKATTSTNHTYNPSG | |
| | | NTESSTWTQSNYSKFKPGNTDSNYGYCSYKVDGETFKAI | |
| | | KNYRKQRFKWLTEYTGENHINSTFAKGKYDEYEYHLGW | |
| | | YSNIFIGNLRHNLAFRSAYIDVTYNPTVDKGKGNIVWFQY | |
| | | LTKPTTQLIRTQAKCVIEDLPLYCAFFGYEDYIQRTLGPYQ | |
| | | DIETVGVICFISPYTEPPCIRKEEQKKDWGFVFYDTNFGN | |
| | | GKTPEGIGQVHPYWMQRWRVMAQFQKETQNRIARSGP | |
| | | FSYRDDIPSATLTANYKFYFNWGGDSIFPQIIKNPCPDTGL | |
| | | RPSGHREPRSVQVVSPLTMGPEFIFHRWDWRRGFYNPK | |
| | | ALKRMLEKSDNDAESSTGPKVPRWFPAHHDQEQESDFD | |
| | | SQETRSQSSQEEAAQEALQDVQETSVQQYLLKQFREQR | |
| | | LLGQQLRLLMLQLTKTQSNLHINPRVLDHA* | |
| EU305676.1 | ABY26046.1 | MFWWGWRRRWWWKPRRRWRRRRARRPRRVPRRRY | 281 |
| | | RRAARRYRGRRVRRRRAGGWRGRRRYSRHYSRRLTVR | |
| | | RKKKKLTLKIWQPQNIRKCRIRGLLPLLICGHTRSAFNYAI | |
| | | HSDDKTPQQESFGGGLSTVSFSLKVLFDQNQRGLNRWS | |
| | | ASNDQLDLARYLGCTFWFYRDKKTDFIVQYDISAPFKLDK | |
| | | NSSPSYHPFMLMKAKHKVLIPSFDTKPKGREKIKVRIQPP | |
| | | KMFIDKWYTQEDLCPVILVSLAVSVASFTHPFCSPQTANP | |
| | | CITFQVLKEFYYPAMGYGAPETTVTSVFNTLYTTATYWQ | |
| | | SHLTPQFVRMPTKNPDNTENNQAQAFNTWVDKDFKTGK | |
| | | LVKYNFPQYAPSIEKLKQLRTYYFEWETKHTGVAAPPTW | |
| | | TTPTSDRYEYHMGMFSPTFLTPFRSAGLDFPGAYQDVTY | |
| | | NPLTDKGVGNRMWFQYNTKIDTQFDARSCKCVLEDMPL | |
| | | YAMAYGYADFLEQEIGEYQDLEANGYVCVISPYTKPPMF | |
| | | NKHNPQQGYVFYDSQWGNGKWIDGTGFVPVYWLTRWR | |
| | | VELLFQKKVLSDIAMSGPFSYPDELKNTVLTAKYRFDFKW | |
| | | GGNLFHQQTIRNPCKPEETSTGRVPRDVQVVDPVTMGP | |
| | | RFVFHSWDWRRGFLSDRALKRMFEKPLDLEGFAASPKR | |
| | | PRIFPPTEGQLAREQKEQEESSDSQEESSLTSLEEVPEE | |
| | | TKLRLHLRKQLREQRSIRQQLRTMFQQLVKTQAGLHLNP | |
| | | LLSSQL* | |
| FJ426280.1 | ACK44071.1 | MAWRWWWQRRWRRRPWPRRRWRRLRRRRPRRPVR | 282 |
| | | RRRRRATVRRRRWRGRRGRRTYTRRAVRRRRRPRKRF | |
| | | VLTQWSPQTARNCSIRGIVPMVICGHTRAGRNYALHSED | |
| | | FTTQIRPFGGSFSTTTWSLKVLWDEHQKFQNRWSYPNT | |
| | | QLDLARYRGVTFWFYRDQKTDYIVQWSRNPPFKLNKYS | |
| | | SPMYHPGMMMQAKKKLVVPSFQTRPKGKKRYRVRIRPP | |
| | | NMFNDKWYTQEDLCPVPLVQIVVSAATQTKKNCSPQTN | |
| | | NPCITFQVLKDKYLNYIGVNSSETRRNSYKTLQEKLYSQC | |
| | | TYFQTTQVLAQLSPAFQPAKKPNRTNNSTSTTLGNKVTD | |
| | | LKSNNGKFHTGNNPVFGMCSYKPSKDILYKANEWLWDN | |
| | | LMVENDLHSTYGKATLKCMEYHTGIYSSIFLSPQRSLEFP | |
| | | AAYQDVTYNPNCDRAIGNRVWFQYGTKMNTNFNEQQC | |
| | | KCVLTNIPLWAAFNGYPDFIEQELGISTEVHNFGIVCFQCP | |
| | | YTFPPLYDKKNPDKGYVFYDTTFGNGKMPDGSGHIPIYW | |
| | | QQRWWIRLAFQVQVMHDFVLTGPFSYKDDLANTTLTAR | |
| | | YKFRFKWGGNIIPEQIIKNPCKREQSLGSYPDRQRRDLQV | |
| | | VDPSTMGPIYTFHTWDWRRGLFGADAIQRVSQKPEDAL | |
| | | RFTNPFKRPRYLPPTDGEDYRQEEDFALQERRRRTSTEE | |
| | | VQDEESPPQNAPLLQQQQQQRELSVQHAEQQRLGVQL | |
| | | RYILQEVLKTQAGLHLNPLLLGPPQTRCISLSPPEAYSP* | |
| FJ392105.1 | ACR20257.1 | MAAWWWGRRRRWRRWRRRRLPRRRRWRRRRRWPR | 283 |
| | | RRRRRWPRRRRRRRPARRPRRRRRRRRVRRPRRRQK | |
| | | LVLTQWNPQTVRKCIIRGFVPLFQCSRTAYHRNFVDHMD | |
| | | DVYTTGPFGGGTGSMLFTLSFFYHEFKKHHCKWSASNR | |
| | | DFDLCRYRGTVLKFYRHPDVDYIVWLNRNPPFQENLLDA | |
| | | MSRQPLIMLQTHKCILVRSFKTHPRGPSYVRMKVRPPRL | |
| | | LTDKWYFQSDFCNVPLFQLQFALAELRFPIGSPQTNTTC | |
| | | VNFLVLDNRYHLFLDNKPQQSDNSQREERGHGYPFNGS | |
| | | EGEADRLKFWHSLWNTGRFLNTTHINTLQPNISKLQEHK | |
| | | AEDTEAKTTYKSLINGNKKVYNDSQYMQNVWAQNKINTL | |
| | | YEAIAEEQYRKIQKYYNTTYGQYQRQLFTGKKYWDYRVG | |
| | | MFSPTFLSPSRLNPEMPGAYTEIAYNPWTDEGTGNVVCL | |
| | | QYLTKETSDYKPHAGSKFTIEDVPLWIAMNGYVDICKKEG | |
| | | KDPGIRLNCLMCIRCPYTRPKLYNPRYPKELFVVYSYNFA | |
| | | HGRMPGGDKYIPMEFKDRWYPSLMHQEEVIEDIVRSGPF | |
| | | ALKDQTEMVTCMMRYSALFNWGGNIIREQAVEDPCKKN | |
| | | TFALPGASGVARLLQVSNPIRQTPSTTWHSWDWRRSLF | |
| | | TQTGIKRMREQQPYDEITYAGPKRPKLTVPAGPTLAAGD | |
| | | AYNYWERKPLTSPGETLPTQTETETEAPEEEAQQEEVQE | |
| | | GLQLQQLWEQQLQQKRQLGVMFQQLLRLRTGAEIHPAL | |
| | | A* | |
| FJ392107.1 | ACR20260.1 | MAAWWWGRRRRWRRWRRRRLPRRRRWRRRRRWPR | 284 |
| | | RRRRRWPRRRRRRRPARRPRRRRRRRRVRRPRRRQK | |
| | | LVLTQWNPQTVRKCIIRGFVPLFQCSRTACHRNFVDHMD | |
| | | DVYTTGPFGGGTGSMLFTLSFFYHEFKKHHCKWSASNR | |
| | | DFDLCRYRGTVLKFYRHPDVDYIVWLNRNPPFQENLLDA | |
| | | MSRQPLIMLQTHKCILVRSFKTHPRGPSYVRMKVRPPRL | |
| | | LTDKWYFQSDFCNVPLFQLQFALAELRFPIGSPQTNTTC | |
| | | VNFLVLDNRYHLFLDNKPQQSENLQRKERGHGYSFTGN | |
| | | EGEVDRLKFWHSLWNTGRFLNTTHINTLLPNISKLQEHKA | |
| | | EDRQANAKYKNLINGNKKVYNDSQYMQNVWEENKINTL | |
| | | YDAIAEEQYRKIQKYYNTTYGQYQRQLFTGKKYWDYRVG | |
| | | MFSPTFLSPSRLNPEMPGAYTEIAYNPWTDEGTGNVVCL | |
| | | QYLTKETSDYKPHAGSKFTIEDVPLWIAMNGYVDICKKEG | |
| | | KDPGIRLNCLMCIRCPYTRPKLYNPRYPEELFVVYSYNFA | |
| | | HGRMPGGDKYIPMEFKDRWYPSLMHQEEVIEDIVRSGPF | |
| | | ALKDQTEMVTCMMRYSALFNWGGNIIREQAVEDPCKKN | |
| | | TFALPGASGVARLLQVSNPIRQTPSTTWHSWDWRRSLF | |
| | | TQTGIKRMREQQPYDEITYAGPKRPKLTVPAGPTLAAGD | |
| | | AYNYWERKPLTSPGETLPTQTDTETEAPEEEAQQEEVQ | |
| | | EGLQLQQLWEQQLQQKRQLGVMFQQLLRLRTGAEIHPA | |
| | | LA* | |
| FJ392108.1 | ACR20262.1 | MAAWWWGRRRRWRRWRRRRLPRRRRWRRRRRWPR | 285 |
| | | RRRRRWPRRRRRRRPARRPRRRRRRRRVRRPRRRQK | |
| | | LVLTQWNPQTVRKCIIRGFVPLFQCSRTAYHRNFVDHMD | |
| | | DVYTTGPFGGGTGSMLFTLSFFYHEFKKHHCKWSASNR | |
| | | DFDLCRYRGTVLKFYRHPDVDYIVWLNRNPPFQEDLLDA | |
| | | MSRQPLIMLQTHKCILVRSFKTHPRGPSYVRMKVRPPRL | |
| | | LTDKWYFQSDFCNVPLFQLQFALAELRFPIGSPQTNTTC | |
| | | VNFLVLDNRYHLFLDNKPQQSDNPQRKERGHGYSFTGN | |
| | | EGEMDRERFWHSLWSTGRFLNTTHINTLLPNISKLQDHK | |
| | | AEDKDAKTTYKSLINDNKKVYNDSQYMQNVWDQNKIHTL | |
| | | YMAIAEEQYRKIQKYYNTTYGQYQRQLFTGKKYWDYRV | |
| | | GMFSPTFLSPSRLNPEMPGAYTEIAYNPWTDEGTGNVV | |
| | | CLQYLTKETSDYKPHAGSKFTIEDVPLWIAMNGYVDICKK | |
| | | EGKDPGIRLNCLMCIRCPYTRPKLYNPRYPEELFVVYSYN | |
| | | FAHGRMPGGDKYIPMEFKDRWYPSLMHQEEVIEDIVRSS | |
| | | PFALKDQTEMVTCMMRYSALFNWGGNIIREQAVEDPCK | |
| | | KNTFALPGASGVARLLQVSNPIRQTPSTTWHSWDWRRS | |
| | | LFTQTGIKRMREQQPYDEITYAGPKRPKLTVPAGPTLAAG | |
| | | DAYNYWERKPLTSPGETLPTQTETETEAPEEEAQQEEV | |
| | | QEGLQLQQLWEQQLQQKRQLGVMFQQLLRLRTGAEIHP | |
| | | ALA* | |
| FJ392111.1 | ACR20267.1 | MAAWWWGRRRRWRRWRRRRLPRRRRWRRRRRWPR | 286 |
| | | RRRRRWPRRRRRRRPARRPRRRRRRRRVRRPRRRQK | |
| | | LVLTQWNPQTVRKCIIRGFVPLFQCSRTAYHRNFVDHMD | |
| | | DVYTTGPFGGGAGSMLFTLSFFYHEFKKHHCKWSASNR | |
| | | DFDLSRYRGAVLKFYRHPDVDYIVWLNRNPPFQENLLDA | |
| | | MSRQPLIMLQTHKCILVRSFKTHPRGPSYVRMKVRPPRL | |
| | | LTDKWYFQSDFCNVPLFQLQFALAELRFPIGSPQTNTTC | |
| | | VNFLVLDNRYHSFLDNKPQQSENSQRKERGHGYSFTGK | |
| | | EGEQDRLTFWQSLWNTGRFLNTTHINTLLPNISKLQDHK | |
| | | AEDTDANPDYKSLINGNKKVYNDSQYMQNVWQQGKINT | |
| | | LCNAIAQEQYRKIQKYYNTTYGQYQRQLFTGKKYWDYRV | |
| | | GTFSPTFLSPSRLNPEMPGAYTEIAYNPWTDEGTGNVVC | |
| | | LQYLTKETSDYKPHAGSKFTIEDVPLWIAMNGYVDICKKE | |
| | | GKDPGIRLNCLMCIRCPYTRPKLYNPRYPEELFVVYSYNF | |
| | | SHGRMPGGDKYIPMEFKDRWYPSLMHQEEVIEDIVRSG | |
| | | PFALKDQTDMVTCMMRYSALFNWGGNIIREQAVEDPCK | |
| | | KNTFALPGASGVARLLQVSNPIRQTPSTTWHSWDWRRS | |
| | | LFTQTGIKRMREQQPYDEITYAGPKRPKLTVPAGPTLAAG | |
| | | DAYNYWERKPLTSPGETLPTQTETETEAPEEEAQQEEV | |
| | | QEGLQLQQLWEQQLQQKRQLGVMFQQLLRLRTGAEIHP | |
| | | ALA* | |
| FJ392112.1 | ACR20269.1 | MAAWWWGRRRRWRRWRRRRLPRRRRWRRRRRWPR | 287 |
| | | RRRRRWPRRRRRRRPARRPRRRRRRRRVRRPRRRQK | |
| | | LVLTQWNPQTVRKCIIRGFVPLFQCSRTAYHRNFVDHMD | |
| | | DVYTTGPFGGGTGSMLFTLSFFYHEFKKHHCKWSASNR | |
| | | DFDLCRYRGTVLKFYRHPDVDYIVWLNRNPPFQENLLDA | |
| | | MSRQPLIMLQTHKCILVRSFKTHPRGPSYVRMKVRPPRL | |
| | | LTDKWYFQSDFCNVPLFQLQFALAELRFPIGSPQTNTTC | |
| | | VNFLVLDNRYHLFLDNKPRQSENLQRKERGHGYVFTGN | |
| | | EGEDDRLKFWHSLWSTGRFLNTTHINTLLPNISKLQDHEA | |
| | | EDTQAKTDYKSLINGNKKVYNDSQYMQDVWEQKKIQTLY | |
| | | KVIAEEQYRKIEKYYNTTYGQYQRQLFTGKKYWDYRVGM | |
| | | FSPTFLSPSRLNPEMPGAYTEIAYNPWTDEGTGNVVCLQ | |
| | | YLTKETSDYKPHAGSKFTIEDVPLWIAMNGYVDICKKEGK | |
| | | DPGIRLNCLMCIRCPYTRPKLYNPRYPEELFVVYSYNFAH | |
| | | GRMPGGDKYIPMEFKDRWYPSLMHQEEVIEDIVRSGPFA | |
| | | LKDQTEMVTCMMRYSALFNWGGNIIREQAVEDPCKKNT | |
| | | FALPGASGVARLLQVSNPIRQTPSTTWHSWDWRRSLFT | |
| | | QTGIKRMREQQPYDEITYAGPKRPKLTVPAGPTLAAGDA | |
| | | YNYWERKPLTSPGETLPTQTETETEAPEEEAQQEEVQE | |
| | | GLQLQQLWEQQLQQKRQLGVMFQQLLRLRTGAEIHPAL | |
| | | A* | |
| FJ392114.1 | ACR20272.1 | MAAWWWGRRRRWRRWRRRRLPRRRRWRRRRRWPR | 288 |
| | | RRRRRWPRRRRRRGPARRLRRRRRRRRVRRPRRRQKL | |
| | | VLTQWNPQTQRKCVVRGFLPLFFCGQGAYHRNFVEHM | |
| | | DDVFPKGPSGGGFGSMVWNLDFLYQEFKKHHNKWSSS | |
| | | NRDFDLVRCHGTVIKFYRHSDFDYLVHVTRTPPFKEDLLT | |
| | | IVSHQPGLMMQNYRCILVKSYKTHPGGRPYITPKIRPPRL | |
| | | LTDKWYFRPDFCGVPLFKLYVTLAELRFPICSPQTDTNCV | |
| | | TFLVLDNTYYDYLDNTADTTRDHERQQKWTNMKMTPRY | |
| | | HLTSHINTLFSGTQQMQSAKETGKDSQFRENIWKTAEVV | |
| | | KIIKDIASKNMQKQQTYYTKTYGAYATQYFTGKQYWDWR | |
| | | VGLFSPIFLSPSRLNPQEPGAYTEIAYNPWTDEGTGNIVCI | |
| | | QYLTKKDSHYKPGAGSKFAVTDVPLWAALFGYYDQCKK | |
| | | ESKDANIRLNRLLLVRCPYTRPKLYNPRDPDQLFVMYSY | |
| | | NFGHGRMPGGDKYVPMEFKDRWYPCMLHQEEVVEEIV | |
| | | RCGPFAPKDMTPSVTCMARYSSLFTWGGNIIREQAVEDP | |
| | | CKKSTFAIPGAGGLARILQVSNPQRQAPTTTWHSWGWR | |
| | | RSLFTETGLKRMQEQQPYDEMSYTGPKRPKLSVPPAAE | |
| | | GNLAAGGGLFFRDGKQPASPGGSLPTQSETEAEAEDEE | |
| | | AHQEETEEGAQLQQLWEQQLQQKRELGIVFQHLLRLRQ | |
| | | GAEIHPGLV* | |
| FJ392115.1 | ACR20274.1 | MAAWWWGRRRRWRRWRRRRXPRRRRWRRRRRWPR | 289 |
| | | RRRRRWPRRRRRRRPARRLRRRRRRRRVRRPRRRQKL | |
| | | VLTQWNPQTQRKCVVRGFLPLFFCGQGAYHRNFVEHM | |
| | | DDVFPKGPSGGGFGSMVWNLDFLYQEFKKHHNRWSSS | |
| | | NRDFDLVRYHGTVIKFYRHSDFDYLVHVTRTPPFKEDLLT | |
| | | IVSHQPGLMMQNYRCILVKSYKTHPGGRPYITLKIRPPRL | |
| | | LTDKWYFQPDFCGVPLFKLYVTLAELRFPICSPQTDTNCV | |
| | | TFLVLDNTYYDYLDSTADTTRDNERHQKWKNMIMTPRYH | |
| | | LTSHINTLFSGTQQMQNAKETGKDSQFRENIWKTEEVVKI | |
| | | IHDIASRNMQKQITYYTKTYGAYATQYFTGKQYWDWRVG | |
| | | LFSPIFLSPSRLNPQEPGAYTEIAYNPWTDEGTGNIVCIQY | |
| | | LTKKDSHYKPGAGSKFAVTDVPLWAALFGYYDQCKKES | |
| | | KDANIRLNCLLLVRCPYTRPKLYNPRDPDQLFVMYSYNF | |
| | | GHGRMPGGDKYVPMEFKDRWYPCMLHQEEVVEEIVRC | |
| | | GPFAPKDMTPSVTCMARYSSLFTWGGNIIREQAVEDPCK | |
| | | KSTFAIPGAGGLARILQVSNPQRQAPTTTWHLWDWRRSL | |
| | | FTETGLKRMQEQQPYDEMSYTGPKRPKLSVPPAAEGNL | |
| | | AAGGGLFFRDRKQPTSPGGSLPTQSETEAEAEDEEAHQ | |
| | | EETEEGAQLQQLWEQQLQQKRELGIVFQHLLRLRQGAEI | |
| | | HPGLV* | |
| FJ392117.1 | ACR20277.1 | MAWWWWRRRRRPWRRRWRWKRRARVRTRRPRRAVR | 290 |
| | | RRRRRVRRRRRGWRRLYRRWRRKGRRRRRRKKLVMK | |
| | | QWNPSTVSRCYIVGYLPIIIMGQGTASMNYASHSDDVYY | |
| | | PGPFGGGISSMRFTLRILYDQFMRGQNFWTKTNEDLDLA | |
| | | RFLGSKWRFYRHKDVDFIVTYETSAPFTDSLESGPHQHP | |
| | | GIQMLMKNKILIPSFATKPKGRSSIKVRIQPPKLMIDKWYP | |
| | | QTDFCEVTLLTIHATACNLRFPFCSPQTDTSCVQFQVLSY | |
| | | NAYRQRISILPELCTREKLREFIKQVVKPNLTCINTLATPW | |
| | | CFKFPELDKLPPVANNATGWSVNPDSGDGDVIYQETTLE | |
| | | TKWIANNDVWHTKDQRAHNNIHSQYGMPQSDALEHKTG | |
| | | YFSPALLSPQRLNPQIPGLYINIVYNPLTDKGEGNKIWCDP | |
| | | LTKNTFGYDPPKSKFLIENLPLWSAVTGYVDYCTKASKDE | |
| | | SFKYNYRVLIQTPYTVPALYSDSETTKNRGYIPIGTDFAYG | |
| | | RMPGGVQQIPIRWRMRWYPMLFNQQPVLEDLFQSGPFA | |
| | | YQGDAKSATLVGKYAFKWLWGGNRIFQQVVRDPRSHQ | |
| | | QDQSVGPSRQPRAVQVFDPKYQAPQWTFHAWDIRRGL | |
| | | FGRQAIKRVSAKPTPDELISTGPKRPRLEVPAFQEEQEKD | |
| | | LLFRQRKHKAWEDTTEEETEAPSEEEEENQELQLVRRLQ | |
| | | QQRELGRGLRCLFQQLTRTQMGLHVDPQLLAPV* | |
| GU797360.1 | ADO51761.1 | MAWGWWKRRRKWWWRRRWTRGRLRKRRARRAGRR | 291 |
| | | PRRRRVRRRRAWRRGRRKRRTFRRRRRRKGRRHRTRL | |
| | | IIRQWQPEIVRKCLIIGYFPMIICGQGRWSENYSSHLEDRV | |
| | | VKQAFGGGHATTRWSLKVLYEENLRHLNFWTWTNRDLE | |
| | | LARYLKVTWTFYRHQDVDFIIYFNRKSPMGGNIYTAPMM | |
| | | HPGALMLSKHKILVKSFKTKPKGKATVKVTIKPPTLLVDK | |
| | | WYFQKDICDMTLLNLNAVAADLRFPFCSPQTDNPCINFQ | |
| | | VLSSVYNNFLSITDNRLTPVTDDGQAYYKAFLDAAFTKDR | |
| | | DFNAVNTFRTISNFSHPQLELPTKTTNTSQDQYFNTLDGY | |
| | | WGDPIYVHTQNIKPDQNLDKCKEILTNNMKNWHKKVKSE | |
| | | NPSSLNHSCFAHNVGIFSSSFLSAGRLAPEVPGLYTDVIY | |
| | | NPYTDKGKGNMLWVDYCSKGDNLYKEGQSKCLLANLPL | |
| | | WMATNGYIDWVKKETDNWVINTQARVLMVCPYTYPKLY | |
| | | HEIQPLYGFVVYSYNFGEGKMPNGATYIPFKFRNKWYPTI | |
| | | YMQQAVLEDISRSGPFALKQQIPSATLTAKYKFKFLFGGN | |
| | | PTSEQVVRDPCTQPTFELPGASTQPPRIQVTDPKLLGPH | |
| | | YSFHSWDLRRGYYSTKSIKRMSEHEEPSEFIFPGPKKPR | |
| | | VDLGPIQQQERPSDSLQRESRPWETSEEESEAEVQQEE | |
| | | TEEVPLRQQLLHNLREQQQLRKGLQCVFQQLIKTQQGVH | |
| | | IDPSLL* | |
| DQ003341.1 | AAX94182.1 | MAWSWWWRRRKRWWPRRRRRWRRFRTRRARRAVPR | 292 |
| | | RRRRRRVRRRRWGRRGRRRRVFYKRRRRKTGRLYRKP | |
| | | KKKLVLTQWHPTTVRNCSIRGLVPLVLCGHTQGGRNFAL | |
| | | RSDDYPKQGSPYGGSFSTTTWNLRVLFDEHQKHHNTW | |
| | | SYPNNQLDLGRYKGCTFCFYRGKKTDYIVKFQRRGPFKI | |
| | | NKYSSPMAHPGMMMLDKMKILVPSFDTRPGGR* | |
| DQ003342.1 | AAX94185.1 | MAWSWWWRRRKRWWPRRRRRWRRFRTRRARRAVPR | 293 |
| | | RRRRRRVRRRRWGRRGRRRRVFYKRRRRKTGRLYRKP | |
| | | KKKLVLTQWHPTTVRNCSIRGLVPLVLCGHTQGGRNFAL | |
| | | RSDDYPKQGSPYGGSFSTTTWNLRVLFDEHQKHHNTW | |
| | | SYPNNQLDLGRYKGCTFCFYRGKKTDYIVKFQRRGPFKI | |
| | | NKYSSPMAHPGMMMLDKMKILVPSFDTRPGGR* | |
| DQ003343.1 | AAX94188.1 | MAWSWWWRRRKRWWPRRRRRWRRFRTRRARRAVPR | 294 |
| | | RRRRRRVRRRRWGRRRRRRRVFYKRRRRKTGRLYRKP | |
| | | KKKLVLTQWHPTTVRNCSIRGLVPLVLCGHTQGGRNFAL | |
| | | RSDDYPKQGSPYGGSFSTTTWNLRVLFDEHQKHHNTW | |
| | | SYPNNQLDLGRYKGCTFYFYRDKKTDYIVKFQRRGPFKI | |
| | | NKYSSPMAHPGMMMLDKMKILVPSFDTRPGGR* | |
| DQ003344.1 | AAX94191.1 | MAWSWWWRRRKRWWPRRRRRWRRFRTRRARRAVPR | 295 |
| | | RRRRRRVRRRRWGRRRRRRRVFYKRRRRKTGRLYRKP | |
| | | KKKLVLTQWHPTTVRNCSIRGLVPLVLCGHTQGGRNFAL | |
| | | RSDDYPKQGSPYGGSFSTTTWNLRVLFDEHQKHHNTW | |
| | | SYPNNQLDLGRYKGCTFYFYRDKKTDYIVKFQRRGPFKI | |
| | | NKYSSPMAHPGMMMLDKMKILVPSFDTRPGGR* | |
| DQ003341.1 | AAX94183.1 | MYYGCIGINSTLTTKYENLFNKLYSKCCYFETFQTIAQLNP | 296 |
| | | GFKAAKKTTNGSGSTAATLGDAVTELKNPNGTFYTGNNS | |
| | | TFGCCTYKPTKQIGSNANKWFWHQLTATDSDTLGQYGR | |
| | | ASIQYMEYHTGIYSSIFLSPLRSNLELPTAYQDVTYNPLTD | |
| | | RGIGNRIWYQYSTKENTTFNETQCKCVLSDLPLWSMFYG | |
| | | YVDFIESELGISAEIHNFGIVCVQCPYTFPPMFDKSKPDKG | |
| | | YVFYDTLFGNGKMPDGSGHVPTYWQQRWWPRFSFQR | |
| | | QVMHDIILTGPFSYKDDSVMTGITAGYKFKFSWGGDMVS | |
| | | EQVIKNPERGDGRDSTYPDRQRRDSQVVDPRSMGPQW | |
| | | VFHTFDYRRGLFGKDAIKRVSEKPTDPDYFTTPYKKPRFF | |
| | | PPTAGEEKLQEEDSALQEKRSPLSSEEGQTRAQVLQQQ | |
| | | VLQSELQQQQELGEQLRFLLREMFKTQAGIHMNPRAFQ | |
| | | EL* | |
| DQ003342.1 | AAX94186.1 | MYYGCIGINSTLTTKYENLFNKLYSKCCYFETFQTIAQLNP | 297 |
| | | GFKAAKKTTNGSGSTAATLGDAVTELKNPNGTFYTGNNS | |
| | | TFGCCTYKPTKQIGSNANKWFWHQLTATDSDTLGQYGR | |
| | | ASIQYMEYHTGIYSSIFLSPLRSNLELPTAYQDVTYNPLTD | |
| | | RGIGNRIWYQYSTKENTTFNETQCKCVLSDLPLWSMFYG | |
| | | YVDFIESELGISAEIHNFGIVCVQCPYTFPPMFDKSKPDKG | |
| | | YVFYDTLFGNGKMPDGSGHVPTYWQQRWWPRFSFQR | |
| | | QVMHDIILTGPFSYKDDSVMTGITAGYKFKFSWGGDMVS | |
| | | EQVIKNPERGDGRDSTYPDRQRRDSQVVDPRSMGPQW | |
| | | VFHTFDYRRGLFGKDAIKRVSEKPTDPDYFTTPYKKPRFF | |
| | | PPTAGEEKLQEEDSALQEKRSPLSSEEGQTRAQVLQQQ | |
| | | VLQSELQQQQELGEQLRFLLREMFKTQAGIHMNPRAFQ | |
| | | EL* | |
| DQ003343.1 | AAX94189.1 | MYYDCIGINSTLTTKYENLFNKLYSKCCYFETFQTIAQLNP | 298 |
| | | GFKAAKKTTNGSGSTAATLGDAVTELKNPNGTFYTGNNS | |
| | | TFGCCTYKPTKQIGSNANKWFWHQLTATDSDTLGQYGR | |
| | | ASIQYMEYHTGIYSSIFLSPLRSNLEFPTAYQDVTYNPLTD | |
| | | RGIGNRIWYQYSTKENTTFNETQCKCVLSDLPLWSMFYG | |
| | | YVDFIESELGISAEIHNFGIVCVQCPYTFPPMFDKSKPDKG | |
| | | YVFYDTLFGNGKMPDGSGHVPTYWQQRWWPRFSFQR | |
| | | QVMHDIILTGPFSYKDDSVMTGITAGYKFKFSWGGDMVS | |
| | | EQVIKNSERGDGRDSTYPDRQRRDLQVVDPRSMGPQW | |
| | | VFHTFDYRRGLFGKDAIKRVSEKPTDPDYFTTPYKKPRFF | |
| | | PPTAGEEKLQEEDSALQEKRSPLSSEEGQTRAQVLQQQ | |
| | | VLQSELQQQQELGEQLRFLLREMFKTQAGIHMNPRAFQ | |
| | | EL* | |
| DQ003344.1 | AAX94192.1 | MYYDCIGINSTLTTKYENLFNKLYSKCCYFETFQTIAQLNP | 299 |
| | | GFKAAKKTTNGSGSTAATLGDAVTELKNPNGTFYTGNNS | |
| | | TFGCCTYKPTKQIGSNANKWFWHQLTATDSDTLGQYGR | |
| | | ASIQYMEYHTGIYSSIFLSPLRSNLEFPTAYQDVTYNPLTD | |
| | | RGIGNRIWYQYSTKENTTFNETQCKCVLSDLPLWSMFYG | |
| | | YVDFIESELGISAEIHNFGIVCVQCPYTFPPMFDKSKPDKG | |
| | | YVFYDTLFGNGKMPDGSGHVPTYWQQRWWPRFSFQR | |
| | | QVMHDIILTGPFSYKDDSVMTGITAGYKFKFSWGGDMVS | |
| | | EQVIKNSERGDGRDSTYPDRQRRDLQVVDPRSMGPQW | |
| | | VFHTFDYRRGLFGKDAIKRVSEKPTDPDYFTTPYKKPRFF | |
| | | PPTAGEEKLQEEDSALQEKRSPLSSEEGQTRAQVLQQQ | |
| | | VLQSELQQQQELGEQLRFLLREMFKTQAGIHMNPRAFQ | |
| | | EL* | |

[0412] In some embodiments, the genetic element comprises a nucleotide sequence encoding an amino acid sequence or a functional fragment thereof or a sequence having at least about 60%, 70% 80%, 85%, 90% 95%, 96%, 97%, 98%, 99%, or 100% sequence identity to any one of the amino acid sequences described herein, e.g., Table 17. In some embodiments, the substantially non-pathogenic protein comprises an amino acid sequence or a functional fragment thereof or a sequence having at least about 60%, 65%, 70%, 75%, 80%, 85%, 90% 95%, 96%, 97%, 98%, 99%, or 100% sequence identity to any one of the amino acid sequences described herein, e.g., as listed in any of Tables 2, 4, 6, 8, 10, 12, 14, 16, or 17.

[0413] In some embodiments, the genetic element comprises a nucleotide sequence encoding an amino acid sequence having about position 1 to about position 150 (e.g., or any subset of amino acids within each range, e.g., about position 20 to about position 35, about position 25 to about position 30, about position 26 to about 30), about position 150 to about position 390 (e.g., or any subset of amino acids within each range, e.g., about position 200 to about position 380, about position 205 to about position 375, about position 205 to about 371), about 390 to about position 525, about position 525 to about position 850 (e.g., or any subset of amino acids within each range, e.g., about position 530 to about position 840, about position 545 to about position 830, about position 550 to about 820), about 850 to about position 950 (e.g., or any subset of amino acids within each range, e.g., about position 860 to about position 940, about position 870 to about position 930, about position 880 to about 923) of the amino acid sequences described herein, e.g., as listed in any of Tables 2, 4, 6, 8, 10, 12, 14, 16, or 17, or shown in FIG. 1, or a functional fragment thereof. In some embodiments, the substantially non-pathogenic protein comprises an amino acid sequence or a functional fragment thereof or a sequence having at least about 60%, 65%, 70%, 75%, 80%, 85%, 90% 95%, 96%, 97%, 98%, 99%, or 100% sequence identity to about position 1 to about position 150 (e.g., or any subset of amino acids within each range as described herein), about position 150 to about position 390, about position 390 to about position 525, about position 525 to about position 850, about position 850 to about position 950 of the amino acid sequences described herein, e.g., as listed in any of Tables 2, 4, 6, 8, 10, 12, 14, 16, or 17, or as shown in FIG. 1.

[0414] In some embodiments, the substantially non-pathogenic protein comprises an amino acid sequence or a functional fragment thereof or a sequence having at least about 60%, 65%, 70%, 75%, 80%, 85%, 90% 95%, 96%, 97%, 98%, 99%, or 100% sequence identity to any one of the amino acid sequences or ranges of amino acids described herein, e.g., as listed in any of Tables 2, 4, 6, 8, 10, 12, 14, 16, or 17, or shown in FIG. 1, where the sequence is a functional domain or provides a function, e.g., species and/or tissue and/or cell tropism, viral genome binding and/or packaging, immune evasion (non-immunogenicity and/or tolerance), pharmacokinetics, endocytosis and/or cell attachment, nuclear entry, intracellular modulation and localization, exocytosis modulation, propagation, nucleic acid protection, and a combination thereof. In some embodiments, the ranges of amino acids with less sequence identity may provide one or more of the properties described herein and differences in cell/tissue/species specificity (e.g. tropism).

[0415] Protein Binding Sequence

[0416] A strategy employed by many viruses is that the viral capsid protein recognizes a specific protein binding sequence in its genome. For example, in viruses with unsegmented genomes, such as the L-A virus of yeast, there is a secondary structure (stem-loop) and a specific sequence at the 5′ end of the genome that are both used to bind the viral capsid protein. However, viruses with segmented genomes, such as Reoviridae, Orthomyxoviridae (influenza), Bunyaviruses and Arenaviruses, need to package each of the genomic segments. Some viruses utilize a complementarity region of the segments to aid the virus in including one of each of the genomic molecules. Other viruses have specific binding sites for each of the different segments. See for example, Curr Opin Struct Biol. 2010 February; 20(1): 114-120; and Journal of Virology (2003), 77(24), 13036-13041.

[0417] In some embodiments, the genetic element encodes a protein binding sequence that binds to the substantially non-pathogenic protein. In some embodiments, the protein binding sequence facilitates packaging the genetic element into the proteinaceous exterior. In some embodiments, the protein binding sequence specifically binds an arginine-rich region of the substantially non-pathogenic protein. In some embodiments, the genetic element comprises a protein binding sequence as described in Example 8. In some embodiments, the genetic element comprises a protein binding sequence having at least 70%, 80%, 85%, 90%, 95%, 96%, 97%, 98%, 99%, or 100% sequence identity to a 5′ UTR conserved domain or GC-rich domain of an Anellovirus sequence (e.g., as shown in any of Tables 1, 3, 5, 7, 9, 11, or 13). In embodiments, the protein binding sequence has at least about 70%, 75%, 80%, 85%, 90%, 95%, 96%, 97%, 98%, 99%, or 100% sequence identity to the Anellovirus 5′ UTR conserved domain nucleotide sequence of Table 1 (e.g., nucleotides 177-247 of the nucleic acid sequence of Table 1). In embodiments, the protein binding sequence has at least about 70%, 75%, 80%, 85%, 90%, 95%, 96%, 97%, 98%, 99%, or 100% sequence identity to the Anellovirus GC-rich nucleotide sequence of Table 1 (e.g., nucleotides 3415-3570 of the nucleic acid sequence of Table 1). In embodiments, the protein binding sequence has at least about 70%, 75%, 80%, 85%, 90%, 95%, 96%, 97%, 98%, 99%, or 100% sequence identity to the Anellovirus 5′ UTR conserved domain nucleotide sequence of Table 3 (e.g., nucleotides 174-244 of the nucleic acid sequence of Table 3). In embodiments, the protein binding sequence has at least about 70%, 75%, 80%, 85%, 90%, 95%, 96%, 97%, 98%, 99%, or 100% sequence identity to the Anellovirus GC-rich nucleotide sequence of Table 3 (e.g., nucleotides 3691-3794 of the nucleic acid sequence of Table 3). In embodiments, the protein binding sequence has at least about 70%, 75%, 80%, 85%, 90%, 95%, 96%, 97%, 98%, 99%, or 100% sequence identity to the Anellovirus 5′ UTR conserved domain nucleotide sequence of Table 5 (e.g., nucleotides 170-240 of the nucleic acid sequence of Table 5). In embodiments, the protein binding sequence has at least about 70%, 75%, 80%, 85%, 90%, 95%, 96%, 97%, 98%, 99%, or 100% sequence identity to the Anellovirus GC-rich nucleotide sequence of Table 5 (e.g., nucleotides 3632-3753 of the nucleic acid sequence of Table 5). In embodiments, the protein binding sequence has at least about 70%, 75%, 80%, 85%, 90%, 95%, 96%, 97%, 98%, 99%, or 100% sequence identity to the Anellovirus 5′ UTR conserved domain nucleotide sequence of Table 7 (e.g., nucleotides 174-244 of the nucleic acid sequence of Table 7). In embodiments, the protein binding sequence has at least about 70%, 75%, 80%, 85%, 90%, 95%, 96%, 97%, 98%, 99%, or 100% sequence identity to the Anellovirus GC-rich nucleotide sequence of Table 7 (e.g., nucleotides 3733-3853 of the nucleic acid sequence of Table 7). In embodiments, the protein binding sequence has at least about 70%, 75%, 80%, 85%, 90%, 95%, 96%, 97%, 98%, 99%, or 100% sequence identity to the Anellovirus 5′ UTR conserved domain nucleotide sequence of Table 9 (e.g., nucleotides 171-241 of the nucleic acid sequence of Table 9). In embodiments, the protein binding sequence has at least about 70%, 75%, 80%, 85%, 90%, 95%, 96%, 97%, 98%, 99%, or 100% sequence identity to the Anellovirus GC-rich nucleotide sequence of Table 9 (e.g., nucleotides 3644-3758 of the nucleic acid sequence of Table 9). In embodiments, the protein binding sequence has at least about 70%, 75%, 80%, 85%, 90%, 95%, 96%, 97%, 98%, 99%, or 100% sequence identity to the Anellovirus 5′ UTR conserved domain nucleotide sequence of Table 11 (e.g., nucleotides 323-393 of the nucleic acid sequence of Table 11). In embodiments, the protein binding sequence has at least about 70%, 75%, 80%, 85%, 90%, 95%, 96%, 97%, 98%, 99%, or 100% sequence identity to the Anellovirus GC-rich nucleotide sequence of Table 11 (e.g., nucleotides 2868-2929 of the nucleic acid sequence of Table 11). In embodiments, the protein binding sequence has at least about 70%, 75%, 80%, 85%, 90%, 95%, 96%, 97%, 98%, 99%, or 100% sequence identity to the Anellovirus 5′ UTR conserved domain nucleotide sequence of Table 13 (e.g., nucleotides 117-187 of the nucleic acid sequence of Table 13). In embodiments, the protein binding sequence has at least about 70%, 75%, 80%, 85%, 90%, 95%, 96%, 97%, 98%, 99%, or 100% sequence identity to the Anellovirus GC-rich nucleotide sequence of Table 13 (e.g., nucleotides 3054-3172 of the nucleic acid sequence of Table 13).

[0418] In some embodiments, the genetic element (e.g., protein-binding sequence of the genetic element) comprises a nucleic acid sequence having at least about 75% (e.g., at least 75%, 80%, 85%, 90%, 95%, 96%, 97%, 98%, 99%, or 100%) identity to a nucleic acid sequence shown in Table 16-1 and/or FIG. 21. In some embodiments, the genetic element (e.g., protein-binding sequence of the genetic element) comprises a nucleic acid sequence of the Consensus 5′ UTR sequence shown in Table 16-1, wherein X₁, X₂, X₃, X₄, and X₅ are each independently any nucleotide, e.g., wherein X₁=G or T, X₂=C or A, X₃=G or A, X₄=T or C, and X₅=A, C, or T). In embodiments, the genetic element (e.g., protein-binding sequence of the genetic element) comprises a nucleic acid sequence having at least about 75% (e.g., at least 75%, 80%, 85%, 90%, 95%, 96%, 97%, 98%, 99%, or 100%) identity to the Consensus 5′ UTR sequence shown in Table 16-1. In embodiments, the genetic element (e.g., protein-binding sequence of the genetic element) comprises a nucleic acid sequence having at least about 75% (e.g., at least 75%, 80%, 85%, 90%, 95%, 96%, 97%, 98%, 99%, or 100%) identity to the exemplary TTV 5′ UTR sequence shown in Table 16-1. In embodiments, the genetic element (e.g., protein-binding sequence of the genetic element) comprises a nucleic acid sequence having at least about 75% (e.g., at least 75%, 80%, 85%, 90%, 95%, 96%, 97%, 98%, 99%, or 100%) identity to the TTV-CT30F 5′ UTR sequence shown in Table 16-1. In embodiments, the genetic element (e.g., protein-binding sequence of the genetic element) comprises a nucleic acid sequence having at least about 75% (e.g., at least 75%, 80%, 85%, 90%, 95%, 96%, 97%, 98%, 99%, or 100%) identity to the TTV-HD23a 5′ UTR sequence shown in Table 16-1. In embodiments, the genetic element (e.g., protein-binding sequence of the genetic element) comprises a nucleic acid sequence having at least about 75% (e.g., at least 75%, 80%, 85%, 90%, 95%, 96%, 97%, 98%, 99%, or 100%) identity to the TTV-JA20 5′ UTR sequence shown in Table 16-1. In embodiments, the genetic element (e.g., protein-binding sequence of the genetic element) comprises a nucleic acid sequence having at least about 75% (e.g., at least 75%, 80%, 85%, 90%, 95%, 96%, 97%, 98%, 99%, or 100%) identity to the TTV-TJN02 5′ UTR sequence shown in Table 16-1. In embodiments, the genetic element (e.g., protein-binding sequence of the genetic element) comprises a nucleic acid sequence having at least about 75% (e.g., at least 75%, 80%, 85%, 90%, 95%, 96%, 97%, 98%, 99%, or 100%) identity to the TTV-tth8 5′ UTR sequence shown in Table 16-1.

TABLE 16-1
Exemplary 5′ UTR sequences from Anelloviruses

| | | SEQ |
|---|---|---|
| | | ID |
| Source | Sequence | NO: |
| Consensus | CGGGTGCCGX₁AGGTGAGTTTACACACCGX₂AGT | 715 |
| | CAAGGGGCAATTCGGGCTCX₃GGACTGGCCGGG | |
| | CX₄X₅TGGG | |
| | X₁ = G or T | |
| | X₂ = C or A | |
| | X₃ = G or A | |
| | X₄ = T or C | |
| | X₅ = A, C, or T | |
| Exemplary TTV | CGGGTGCCGGAGGTGAGTTTACACACCGCAGTC | 703 |
| Sequence | AAGGGGCAATTCGGGCTCGGGACTGGCCGGGCT | |
| | WTGGG | |
| TTV-CT30F | CGGGTGCCGTAGGTGAGTTTACACACCGCAGTC | 704 |
| | AAGGGGCAATTCGGGCTCGGGACTGGCCGGGCT | |
| | ATGGG | |
| TTV-HD23a | CGGGTGCCGGAGGTGAGTTTACACACCGCAGTC | 705 |
| | AAGGGGCAATTCGGGCTCGGGACTGGCCGGGCC | |
| | CTGGG | |
| TTV-JA20 | CGGGTGCCGGAGGTGAGTTTACACACCGCAGTC | 706 |
| | AAGGGGCAATTCGGGCTCGGGACTGGCCGGGCT | |
| | TTGGG | |
| TTV-TJN02 | CGGGTGCCGGAGGTGAGTTTACACACCGCAGTC | 707 |
| | AAGGGGCAATTCGGGCTCGGGACTGGCCGGGCT | |
| | ATGGG | |
| TTV-tth8 | CGGGTGCCGGAGGTGAGTTTACACACCGAAGTC | 708 |
| | AAGGGGCAATTCGGGCTCAGGACTGGCCGGGCT | |
| | TTGGG | |

[0419] In some embodiments, the genetic element (e.g., protein-binding sequence of the genetic element) comprises a nucleic acid sequence having at least about 75% (e.g., at least 75%, 80%, 85%, 90%, 95%, 96%, 97%, 98%, 99%, or 100%) identity to a nucleic acid sequence shown in Table 16-2 and/or FIG. 22. In embodiments, the genetic element (e.g., protein-binding sequence of the genetic element) comprises a nucleic acid sequence of the Consensus GC-rich sequence shown in Table 16-1, wherein X₁, X₄, X₅, X₆, X₇, X₁₂, X₁₃, X₁₄, X₁₅, X₂₀, X₂₁, X₂₂, X₂₆, X₂₉, X₃₀, and X₃₃ are each independently any nucleotide and wherein X₂, X₃, X₈, X₉, X₁₀, X₁₁, X₁₆, X₁₇, X₁₈, X₁₉, X₂₃, X₂₄, X₂₅, X₂₇, X₂₈, X₃₁, X₃₂, and X₃₄ are each independently absent or any nucleotide. In some embodiments, one or more of (e.g., all of) X₁ through X₃₄ are each independently the nucleotide (or absent) specified in Table 16-2. In embodiments, the genetic element (e.g., protein-binding sequence of the genetic element) comprises a nucleic acid sequence having at least about 75% (e.g., at least 75%, 80%, 85%, 90%, 95%, 96%, 97%, 98%, 99%, or 100%) identity to the Consensus GC-rich sequence shown in Table 16-1. In embodiments, the genetic element (e.g., protein-binding sequence of the genetic element) comprises a nucleic acid sequence having at least about 75% (e.g., at least 75%, 80%, 85%, 90%, 95%, 96%, 97%, 98%, 99%, or 100%) identity to an exemplary TTV GC-rich sequence shown in Table 16-1 (e.g., the full sequence, Fragment 1, Fragment 2, Fragment 3, or any combination thereof, e.g., Fragments 1-3 in order). In embodiments, the genetic element (e.g., protein-binding sequence of the genetic element) comprises a nucleic acid sequence having at least about 75% (e.g., at least 75%, 80%, 85%, 90%, 95%, 96%, 97%, 98%, 99%, or 100%) identity to a TTV-CT30F GC-rich sequence shown in Table 16-1 (e.g., the full sequence, Fragment 1, Fragment 2, Fragment 3, Fragment 4, Fragment 5, Fragment 6, Fragment 7, Fragment 8, or any combination thereof, e.g., Fragments 1-7 in order). In embodiments, the genetic element (e.g., protein-binding sequence of the genetic element) comprises a nucleic acid sequence having at least about 75% (e.g., at least 75%, 80%, 85%, 90%, 95%, 96%, 97%, 98%, 99%, or 100%) identity to a TTV-HD23a GC-rich sequence shown in Table 16-1 (e.g., the full sequence, Fragment 1, Fragment 2, Fragment 3, Fragment 4, Fragment 5, Fragment 6, or any combination thereof, e.g., Fragments 1-6 in order). In embodiments, the genetic element (e.g., protein-binding sequence of the genetic element) comprises a nucleic acid sequence having at least about 75% (e.g., at least 75%, 80%, 85%, 90%, 95%, 96%, 97%, 98%, 99%, or 100%) identity to a TTV-JA20 GC-rich sequence shown in Table 16-1 (e.g., the full sequence, Fragment 1, Fragment 2, or any combination thereof, e.g., Fragments 1 and 2 in order). In embodiments, the genetic element (e.g., protein-binding sequence of the genetic element) comprises a nucleic acid sequence having at least about 75% (e.g., at least 75%, 80%, 85%, 90%, 95%, 96%, 97%, 98%, 99%, or 100%) identity to a TTV-TJN02 GC-rich sequence shown in Table 16-1 (e.g., the full sequence, Fragment 1, Fragment 2, Fragment 3, Fragment 4, Fragment 5, Fragment 6, Fragment 7, Fragment 8, or any combination thereof, e.g., Fragments 1-8 in order). In embodiments, the genetic element (e.g., protein-binding sequence of the genetic element) comprises a nucleic acid sequence having at least about 75% (e.g., at least 75%, 80%, 85%, 90%, 95%, 96%, 97%, 98%, 99%, or 100%) identity to a TTV-tth8 GC-rich sequence shown in Table 16-1 (e.g., the full sequence, Fragment 1, Fragment 2, Fragment 3, Fragment 4, Fragment 5, Fragment 6, or any combination thereof, e.g., Fragments 1-6 in order).

TABLE 16-2
Exemplary GC-rich sequences from Anelloviruses

| | | | SEQ ID |
|---|---|---|---|
| Source | | Sequence | NO: |
| Consensus | | CGGCGGX₁GGX₂GX₃X₄X₅CGCGCTX₆CG | 743 |
| | | CGCGCX₇X₈X₉X₁₀CX₁₁X₁₂X₁₃X₁₄GGGGX₁₅ | |
| | | X₁₆X₁₇X₁₈X₁₉X₂₀X₂₁GCX₂₂X₂₃X₂₄X₂₅CCCCC | |
| | | CCX₂₆CGCGCATX₂₇X₂₈GCX₂₉CGGGX₃₀CC | |
| | | CCCCCCCX₃₁X₃₂X₃₃GGGGGGCTCCGX₃₄C | |
| | | CCCCCGGCCCCCC | |
| | | X₁ = G or C | |
| | | X₂ = G, C, or absent | |
| | | X₃ = C or absent | |
| | | X₄ = G or C | |
| | | X₅ = G or C | |
| | | X₆ = T, G, or A | |
| | | X₇ = G or C | |
| | | X₈ = G or absent | |
| | | X₉ = C or absent | |
| | | X₁₀ = C or absent | |
| | | X₁₁ = G, A, or absent | |
| | | X₁₂ = G or C | |
| | | X₁₃ = C or T | |
| | | X₁₄ = G or A | |
| | | X₁₅ = G or A | |
| | | X₁₆ = A, G, T, or absent | |
| | | X₁₇ = G, C, or absent | |
| | | X₁₈ = G, C, or absent | |
| | | X₁₉ = C, A, or absent | |
| | | X₂₀ = C or A | |
| | | X₂₁ = T or A | |
| | | X₂₂ = G or C | |
| | | X₂₃ = G, T, or absent | |
| | | X₂₄ = C or absent | |
| | | X₂₅ = G, C, or absent | |
| | | X₂₆ = G or C | |
| | | X₂₇ = G or absent | |
| | | X₂₈ = C or absent | |
| | | X₂₉ = G or A | |
| | | X₃₀ = G or T | |
| | | X₃₁ = C, T, or absent | |
| | | X₃₂ = G, C, A, or absent | |
| | | X₃₃ = G or C | |
| | | X₃₄ = C or absent | |
| Exemplary TTV | Full sequence | GCCGCCGCGGCGGCGGSGGNGNSGCG | 709 |
| Sequence | | CGCTDCGCGCGCSNNNCRCCRGGGGGN | |
| | | NNNCWGCSNCNCCCCCCCCCGCGCAT | |
| | | GCGCGGGKCCCCCCCCCNNCGGGGGG | |
| | | CTCCGCCCCCCGGCCCCCCCCCGTGCT | |
| | | AAACCCACCGCGCATGCGCGACCACG | |
| | | CCCCCGCCGCC | |
| | Fragment 1 | GCCGCCGCGGCGGCGGSGGNGNSGCG | 716 |
| | | CGCTDCGCGCGCSNNNCRCCRGGGGGN | |
| | | NNNCWGCSNCNCCCCCCCCCGCGCAT | |
| | Fragment 2 | GCGCGGGKCCCCCCCCCNNCGGGGGG | 717 |
| | | CTCCG | |
| | Fragment 3 | CCCCCCGGCCCCCCCCCGTGCTAAACC | 718 |
| | | CACCGCGCATGCGCGACCACGCCCCCG | |
| | | CCGCC | |
| TTV-CT30F | Full sequence | GCGGCGG-GGGGGCG-GCCGCG- | 710 |
| | | TTCGCGCGCCGCCCACCAGGGGGTG-- | |
| | | CTGCG-CGCCCCCCCCCGCGCAT | |
| | | GCGCGGGGCCCCCCCCC-- | |
| | | GGGGGGGCTCCGCCCCCCCGGCCCCCC | |
| | | CCCGTGCTAAACCCACCGCGCATGCGC | |
| | | GACCACGCCCCCGCCGCC | |
| | Fragment 1 | GCGGCGG | 719 |
| | Fragment 2 | GGGGGCG | 720 |
| | Fragment 3 | GCCGCG | 721 |
| | Fragment 4 | TTCGCGCGCCGCCCACCAGGGGGTG | 722 |
| | Fragment 5 | CTGCG | 723 |
| | Fragment 6 | CGCCCCCCCCCGCGCAT | 724 |
| | Fragment 7 | GCGCGGGGCCCCCCCCC | 725 |
| | Fragment 8 | GGGGGGGCTCCGCCCCCCCGGCCCCCC | 726 |
| | | CCCGTGCTAAACCCACCGCGCATGCGC | |
| | | GACCACGCCCCCGCCGCC | |
| TTV-HD23a | Full sequence | CGGCGGCGGCGGCG- | 711 |
| | | CGCGCGCTGCGCGCGCG--- | |
| | | CGCCGGGGGGGCGCCAGCG- | |
| | | CCCCCCCCCCCGCGCAT | |
| | | GCACGGGTCCCCCCCCCCACGGGGGGC | |
| | | TCCG CCCCCCGGCCCCCCCCC | |
| | Fragment 1 | CGGCGGCGGCGGCG | 727 |
| | Fragment 2 | CGCGCGCTGCGCGCGCG | 728 |
| | Fragment 3 | CGCCGGGGGGGCGCCAGCG | 729 |
| | Fragment 4 | CCCCCCCCCCCGCGCAT | 730 |
| | Fragment 5 | GCACGGGTCCCCCCCCCCACGGGGGGC | 731 |
| | | TCCG | |
| | Fragment 6 | CCCCCCGGCCCCCCCCC | 732 |
| TTV-JA20 | Full sequence | CCGTCGGCGGGGGGGCCGCGCGCTGC | 712 |
| | | GCGCGCGGCCC- | |
| | | CCGGGGGAGGCACAGCCTCCCCCCCCC | |
| | | GCGCGCATGCGCGCGGGTCCCCCCCCC | |
| | | TCCGGGGGGCTCCGCCCCCCGGCCCCC | |
| | | CCC | |
| | Fragment 1 | CCGTCGGCGGGGGGGCCGCGCGCTGC | 733 |
| | | GCGCGCGGCCC | |
| | Fragment 2 | CCGGGGGAGGCACAGCCTCCCCCCCCC | 734 |
| | | GCGCGCATGCGCGCGGGTCCCCCCCCC | |
| | | TCCGGGGGGCTCCGCCCCCCGGCCCCC | |
| | | CCC | |
| TTV-TJN02 | Full sequence | CGGCGGCGGCG- | 713 |
| | | CGCGCGCTACGCGCGCG--- | |
| | | CGCCGGGGGG----CTGCCGC- | |
| | | CCCCCCCCCGCGCAT | |
| | | GCGCGGGGCCCCCCCCC- | |
| | | GCGGGGGGCTCCG | |
| | | CCCCCCGGCCCCCC | |
| | Fragment 1 | CGGCGGCGGCG | 735 |
| | Fragment 2 | CGCGCGCTACGCGCGCG | 736 |
| | Fragment 3 | CGCCGGGGGG | 737 |
| | Fragment 4 | CTGCCGC | 738 |
| | Fragment 5 | CCCCCCCCCGCGCAT | 739 |
| | Fragment 6 | GCGCGGGGCCCCCCCCC | 740 |
| | Fragment 7 | GCGGGGGGCTCCG | 741 |
| | Fragment 8 | CCCCCCGGCCCCCC | 742 |
| TTV-tth8 | Full sequence | GCCGCCGCGGCGGCGGGGG- | 714 |
| | | GCGGCGCGCTGCGCGCGCCGCCCAGTA | |
| | | GGGGGAGCCATGCG--- | |
| | | CCCCCCCCCGCGCAT | |
| | | GCGCGGGGCCCCCCCCC- | |
| | | GCGGGGGGCTCCG | |
| | | CCCCCCGGCCCCCCCCG | |
| | Fragment 1 | GCCGCCGCGGCGGCGGGGG | 744 |
| | Fragment 2 | GCGGCGCGCTGCGCGCGCCGCCCAGTA | 745 |
| | | GGGGGAGCCATGCG | |
| | Fragment 3 | CCCCCCCCCGCGCAT | 746 |
| | Fragment 4 | GCGCGGGGCCCCCCCCC | 747 |
| | Fragment 5 | GCGGGGGGCTCCG | 748 |
| | Fragment 6 | CCCCCCGGCCCCCCCCG | 749 |

[0420] Effector

[0421] In some embodiments, the genetic element may include one or more sequences that encode a functional nucleic acid, e.g., an exogenous effector, e.g., a therapeutic, e.g., a regulatory nucleic acid, e.g., cytotoxic or cytolytic RNA or protein. In some embodiments, the functional nucleic acid is a non-coding RNA.

[0422] In some embodiments, the sequence encoding an exogenous effector is inserted into the genetic element, e.g., at an insert site as described in Example 10, 12, or 22. In embodiments, the sequence encoding an exogenous effector is inserted into the genetic element at a noncoding region, e.g., a noncoding region disposed 3′ of the open reading frames and 5′ of the GC-rich region of the genetic element, in the 5′ noncoding region upstream of the TATA box, in the 5′ UTR, in the 3′ noncoding region downstream of the poly-A signal, or upstream of the GC-rich region. In embodiments, the sequence encoding an exogenous effector is inserted into the genetic element at about nucleotide 3588 of a TTV-tth8 plasmid, e.g., as described herein or at about nucleotide 2843 of a TTMV-LY2 plasmid, e.g., as described herein. In embodiments, the sequence encoding an exogenous effector is inserted into the genetic element at or within nucleotides 336-3015 of a TTV-tth8 plasmid, e.g., as described herein, or at or within nucleotides 242-2812 of a TTV-LY2 plasmid, e.g., as described herein. In some embodiments, the sequence encoding an exogenous effector replaces part or all of an open reading frame (e.g., an ORF as described herein, e.g., an ORF1, ORF1/1, ORF1/2, ORF2, ORF2/2, ORF2/3, and/or ORF2t/3 as shown in any of Tables 1-14).

[0423] In some embodiments, the sequence encoding an exogenous effector comprises 100-2000, 100-1000, 100-500, 100-200, 200-2000, 200-1000, 200-500, 500-1000, 500-2000, or 1000-2000 nucleotides. In some embodiments, the exogenous effector is a nucleic acid or protein payload, e.g., as described in Example 11.

[0424] Regulatory Nucleic Acid

[0425] In some embodiments, the regulatory nucleic acids modify expression of an endogenous gene and/or an exogenous gene. In one embodiment, the regulatory nucleic acid targets a host gene. The regulatory nucleic acids may include, but are not limited to, a nucleic acid that hybridizes to an endogenous gene (e.g., miRNA, siRNA, mRNA, lncRNA, RNA, DNA, an antisense RNA, gRNA as described herein elsewhere), nucleic acid that hybridizes to an exogenous nucleic acid such as a viral DNA or RNA, nucleic acid that hybridizes to an RNA, nucleic acid that interferes with gene transcription, nucleic acid that interferes with RNA translation, nucleic acid that stabilizes RNA or destabilizes RNA such as through targeting for degradation, and nucleic acid that modulates a DNA or RNA binding factor. In embodiments, the regulatory nucleic acid encodes an miRNA.

[0426] In some embodiments, the regulatory nucleic acid comprises RNA or RNA-like structures typically containing 5-500 base pairs (depending on the specific RNA structure, e.g., miRNA 5-30 bps, lncRNA 200-500 bps) and may have a nucleobase sequence identical (or complementary) or nearly identical (or substantially complementary) to a coding sequence in an expressed target gene within the cell, or a sequence encoding an expressed target gene within the cell.

[0427] In some embodiments, the regulatory nucleic acid comprises a nucleic acid sequence, e.g., a guide RNA (gRNA). In some embodiments, the DNA targeting moiety comprises a guide RNA or nucleic acid encoding the guide RNA. A gRNA short synthetic RNA can be composed of a “scaffold” sequence necessary for binding to the incomplete effector moiety and a user-defined ˜20 nucleotide targeting sequence for a genomic target. In practice, guide RNA sequences are generally designed to have a length of between 17-24 nucleotides (e.g., 19, 20, or 21 nucleotides) and complementary to the targeted nucleic acid sequence. Custom gRNA generators and algorithms are available commercially for use in the design of effective guide RNAs. Gene editing has also been achieved using a chimeric “single guide RNA” (“sgRNA”), an engineered (synthetic) single RNA molecule that mimics a naturally occurring crRNA-tracrRNA complex and contains both a tracrRNA (for binding the nuclease) and at least one crRNA (to guide the nuclease to the sequence targeted for editing). Chemically modified sgRNAs have also been demonstrated to be effective in genome editing; see, for example, Hendel et al. (2015) Nature Biotechnol., 985-991.

[0428] The regulatory nucleic acid comprises a gRNA that recognizes specific DNA sequences (e.g., sequences adjacent to or within a promoter, enhancer, silencer, or repressor of a gene).

[0429] Certain regulatory nucleic acids can inhibit gene expression through the biological process of RNA interference (RNAi). RNAi molecules comprise RNA or RNA-like structures typically containing 15-50 base pairs (such as aboutl8-25 base pairs) and having a nucleobase sequence identical (complementary) or nearly identical (substantially complementary) to a coding sequence in an expressed target gene within the cell. RNAi molecules include, but are not limited to: short interfering RNAs (siRNAs), double-strand RNAs (dsRNA), micro RNAs (miRNAs), short hairpin RNAs (shRNA), meroduplexes, and dicer substrates (U.S. Pat. Nos. 8,084,599 8,349,809 and 8,513,207).

[0430] Long non-coding RNAs (lncRNA) are defined as non-protein coding transcripts longer than 100 nucleotides. This somewhat arbitrary limit distinguishes lncRNAs from small regulatory RNAs such as microRNAs (miRNAs), short interfering RNAs (siRNAs), and other short RNAs. In general, the majority (˜78%) of lncRNAs are characterized as tissue-specific. Divergent lncRNAs that are transcribed in the opposite direction to nearby protein-coding genes (comprise a significant proportion ˜20% of total lncRNAs in mammalian genomes) may possibly regulate the transcription of the nearby gene.

[0431] The genetic element may encode regulatory nucleic acids with a sequence substantially complementary, or fully complementary, to all or a fragment of an endogenous gene or gene product (e.g., mRNA). The regulatory nucleic acids may complement sequences at the boundary between introns and exons to prevent the maturation of newly-generated nuclear RNA transcripts of specific genes into mRNA for transcription. The regulatory nucleic acids that are complementary to specific genes can hybridize with the mRNA for that gene and prevent its translation. The antisense regulatory nucleic acid can be DNA, RNA, or a derivative or hybrid thereof.

[0432] The length of the regulatory nucleic acid that hybridizes to the transcript of interest may be between 5 to 30 nucleotides, between about 10 to 30 nucleotides, or about 11, 12, 13, 14, 15, 16, 17, 18, 19, 20, 21, 22, 23, 24, 25, 26, 27, 28, 29, 30 or more nucleotides. The degree of identity of the regulatory nucleic acid to the targeted transcript should be at least 75%, at least 80%, at least 85%, at least 90%, or at least 95%.

[0433] The genetic element may encode a regulatory nucleic acids, e.g., a micro RNA (miRNA) molecule identical to about 5 to about 25 contiguous nucleotides of a target gene. In some embodiments, the miRNA sequence targets a mRNA and commences with the dinucleotide AA, comprises a GC-content of about 30-70% (about 30-60%, about 40-60%, or about 45%-55%), and does not have a high percentage identity to any nucleotide sequence other than the target in the genome of the mammal in which it is to be introduced, for example as determined by standard BLAST search.

[0434] In some embodiments, the regulatory nucleic acid is at least one miRNA, e.g., 2, 3, 4, 5, 6, or more. In some embodiments, the genetic element comprises a sequence that encodes an miRNA at least about 75%, 80%, 85%, 90% 95%, 96%, 97%, 98%, 99% or 100% nucleotide sequence identity to any one of the nucleotide sequences or a sequence that is complementary to a sequence described herein, e.g., in Table 18.

TABLE 18
Examples of regulatory nucleic acids, e.g., miRNAs.

| Accession | Exemplary | | SEQ | | SEQ | | SEQ |
|---|---|---|---|---|---|---|---|
| number of | subsequence | | ID | | ID | | ID |
| strain | nucleotides | Pre_miRNA | NO: | miRNA_5prime_per_MiRdup | NO: | miRNA_3prime_per_MiRdup | NO: |
| AB008394.1 | AB008394_3475_3551 | GCCAUUUUAAGUA | 300 | AGUAGCUGAC | 395 | CAUCCUCGGC | 490 |
| | | GCUGACGUCAAGG | | GUCAAGGAUU | | GGAAGCUACA | |
| | | AUUGACGUAAAGG | | GAC(5′) | | CAA(3′) | |
| | | UUAAAGGUCAUCC | | | | | |
| | | UCGGCGGAAGCUA | | | | | |
| | | CACAAAAUGGU | | | | | |
| AB008394.1 | AB008394_3579_3657 | GCGUACGUCACAA | 301 | CAAGUCACGU | 396 | GGCCCCGUCA | 491 |
| | | GUCACGUGGAGGG | | GGAGGGGACC | | CGUGACUUAC | |
| | | GACCCGCUGUAAC | | CG(5′) | | CAC(3′) | |
| | | CCGGAAGUAGGCC | | | | | |
| | | CCGUCACGUGACU | | | | | |
| | | UACCACGUGUGUA | | | | | |
| AB017613.1 | AB017613_3462_3539 | GCCAUUUUAAGUA | 302 | AAGUAGCUGA | 397 | UCAUCCUCGG | 492 |
| | | GCUGACGUCAAGG | | CGUCAAGGAU | | CGGAAGCUAC | |
| | | AUUGACGUGAAGG | | UGACG(5′) | | ACAA(3′) | |
| | | UUAAAGGUCAUCC | | | | | |
| | | UCGGCGGAAGCUA | | | | | |
| | | CACAAAAUGGUG | | | | | |
| AB017613.1 | AB017613_3566_3644 | GCACACGUCAUAA | 303 | AUAAGUCACG | 398 | GGCCCCGUCA | 493 |
| | | GUCACGUGGUGGG | | UGGUGGGGAC | | CGUGAUUUGU | |
| | | GACCCGCUGUAAC | | CCG(5′) | | CAC(3′) | |
| | | CCGGAAGUAGGCC | | | | | |
| | | CCGUCACGUGAUU | | | | | |
| | | UGUCACGUGUGUA | | | | | |
| AB025946.1 | AB025946_3534_3600 | CUUCCGGGUCAUA | 304 | UGGGGAGGGU | 399 | CCGGGUCAUA | 494 |
| | | GGUCACACCUACG | | UGGCGUAUAG | | GGUCACACCU | |
| | | UCACAAGUCACGU | | CCCGGA(3′) | | ACGUCAC(5′) | |
| | | GGGGAGGGUUGGC | | | | | |
| | | GUAUAGCCCGGAAG | | | | | |
| AB025946.1 | AB025946_3730_3798 | GCCGGGGGGCUGC | 305 | CCCCCCCCGG | 400 | GGCUGCCGCC | 495 |
| | | CGCCCCCCCCGGG | | GGGGGGGUUU | | CCCCCCGGGG | |
| | | GAAAGGGGGGGGC | | GCCC(3′) | | AAAGGGGG(5′) | |
| | | CCCCCCCGGGGGG | | | | | |
| | | GGGUUUGCCCCCC | | | | | |
| | | GGC | | | | | |
| AB028668.1 | AB028668_3537_3615 | AUACGUCAUCAGU | 306 | AUCAGUCACG | 401 | AUCCUCGUCC | 496 |
| | | CACGUGGGGGAAG | | UGGGGGAAGG | | ACGUGACUGU | |
| | | GCGUGCCUAAACC | | CGUGC(5′) | | GA(3′) | |
| | | CGGAAGCAUCCUC | | | | | |
| | | GUCCACGUGACUG | | | | | |
| | | UGACGUGUGUGGC | | | | | |
| AB028669.1 | AB028669_3440_3513 | CAUUUUAAGUAAG | 307 | AAGUAAGGCG | 402 | GAGCACUUCC | 497 |
| | | GCGGAAGCAGCUC | | GAAGCAGCUC | | GGCUUGCCCA | |
| | | GGCGUACACAAAA | | GG(5′) | | A(3′) | |
| | | UGGCGGCGGAGCA | | | | | |
| | | CUUCCGGCUUGCC | | | | | |
| | | CAAAAUGG | | | | | |
| AB028669.1 | AB028669_3548_3619 | GUCACAAGUCACG | 308 | AGUCACGUGG | 403 | CAAUCCUCUU | 498 |
| | | UGGGGAGGGUUGG | | GGAGGGUUGG | | ACGUGGCCUG | |
| | | CGUUUAACCCGGA | | C(5′) | | (3′) | |
| | | AGCCAAUCCUCUU | | | | | |
| | | ACGUGGCCUGUCA | | | | | |
| | | CGUGAC | | | | | |
| AB037926.1 | AB037926_162_232 | CGACCGCGUCCCG | 309 | CCCGAAGGCG | 404 | CGAGGUUAAG | 499 |
| | | AAGGCGGGUACCC | | GGUACCCGAG | | GGCCAAUUCG | |
| | | GAGGUGAGUUUAC | | GU(5′) | | GGCU(3′) | |
| | | ACACCGAGGUUAA | | | | | |
| | | GGGCCAAUUCGGG | | | | | |
| | | CUUGG | | | | | |
| AB037926.1 | AB037926_3454_3513 | CGCGGUAUCGUAG | 310 | UAUCGUAGCC | 405 | GGGCCCCCGC | 500 |
| | | CCGACGCGGACCC | | GACGCGGACC | | GGGGCUCUCG | |
| | | CGUUUUCGGGGCC | | CCG(5′) | | GCG(3′) | |
| | | CCCGCGGGGCUCU | | | | | |
| | | CGGCGCG | | | | | |
| AB037926.1 | AB037926_3531_3609 | CGCCAUUUUGUGA | 311 | AUUUUGUGAU | 406 | GCGGGGCGUG | 501 |
| | | UACGCGCGUCCCC | | ACGCGCGUCC | | GCCGUAUCAG | |
| | | UCCCGGCUUCCGU | | CCUCCC(5′) | | AAAAUGG(3′) | |
| | | ACAACGUCAGGCG | | | | | |
| | | GGGCGUGGCCGUA | | | | | |
| | | UCAGAAAAUGGCG | | | | | |
| AB037926.1 | AB037926_3637_3714 | GCUACGUCAUAAG | 312 | AAGUCACGUG | 407 | CCUCGGUCAC | 502 |
| | | UCACGUGACUGGG | | ACUGGGCAGG | | GUGGCCUGU(3′) | |
| | | CAGGUACUAAACC | | U(5′) | | | |
| | | CGGAAGUAUCCUC | | | | | |
| | | GGUCACGUGGCCU | | | | | |
| | | GUCACGUAGUUG | | | | | |
| AB038621.1 | AB038621_3511_3591 | GGCUSUGACGUCA | 313 | UGACGUCAAA | 408 | CCUCGUCACG | 503 |
| | | AAGUCACGUGGGR | | GUCACGUGGG | | UGACCUGACG | |
| | | AGGGUGGCGUUAA | | RAGGGU(5′) | | UCACAG(3′) | |
| | | ACCCGGAAGUCAU | | | | | |
| | | CCUCGUCACGUGA | | | | | |
| | | CCUGACGUCACAG | | | | | |
| | | CC | | | | | |
| AB038622.1 | AB038622_227_293 | GCCCGUCCGCGGC | 314 | GAUCGAGCGU | 409 | CCGUCCGCGG | 504 |
| | | GAGAGCGCGAGCG | | CCCGUGGGCG | | CGAGAGCGCG | |
| | | AAGCGAGCGAUCG | | GGU(3′) | | AGCGA(5′) | |
| | | AGCGUCCCGUGGG | | | | | |
| | | CGGGUGCCGAAGGU | | | | | |
| AB038622.1 | AB038622_3510_3591 | GGUUGUGACGUCA | 315 | UGACGUCAAA | 410 | AUCCUCGUCA | 505 |
| | | AAGUCACGUGGGG | | GUCACGUGGG | | CGUGACCUGA | |
| | | AGGGCGGCGUUAA | | GAGGGCGG(5′) | | CGUCACG(3′) | |
| | | ACCCGGAAGUCAU | | | | | |
| | | CCUCGUCACGUGA | | | | | |
| | | CCUGACGUCACGG | | | | | |
| | | CC | | | | | |
| AB038623.1 | AB038623_228_295 | GCCCGUCCGCGGC | 316 | GAUCGAGCGU | 411 | CCGUCCGCGG | 506 |
| | | GAGAGCGCGAGCG | | CCCGUGGGCG | | CGAGAGCGCG | |
| | | AAGCGAGCGAUCG | | GGU(3′) | | AGCGA(5′) | |
| | | AGCGUCCCGUGGG | | | | | |
| | | CGGGUGCCGUAGG | | | | | |
| | | UG | | | | | |
| AB038624.1 | AB038624_228_295 | GCCCGUCCGCGGC | 317 | GAUCGAGCGU | 412 | CCGUCCGCGG | 507 |
| | | GAGAGCGCGAGCG | | CCCGUGGGCG | | CGAGAGCGCG | |
| | | AAGCGAGCGAUCG | | GGU(3′) | | AGCGA(5′) | |
| | | AGCGUCCCGUGGG | | | | | |
| | | CGGGUGCCGUAGG | | | | | |
| | | UG | | | | | |
| AB038624.1 | AB038624_3511_3592 | GGCUGUGACGUCA | 318 | UGACGUCAAA | 413 | AUCCUCGUCA | 508 |
| | | AAGUCACGUGGGG | | GUCACGUGGG | | CGUGACCUGA | |
| | | AGGGCGGCGUUAA | | GAGGGCGG(5′) | | CGUCACG(3′) | |
| | | ACCCGGAAGUCAU | | | | | |
| | | CCUCGUCACGUGA | | | | | |
| | | CCUGACGUCACGG | | | | | |
| | | CC | | | | | |
| AB041957.1 | AB041957_3414_3493 | AGACCACGUGGUA | 319 | ACGUGGUAAG | 414 | CUGACCCGCG | 509 |
| | | AGUCACGUGGGGG | | UCACGUGGGG | | UGACUGGUCA | |
| | | CAGCUGCUGUAAA | | GCAGCU(5′) | | CGUGA(3′) | |
| | | CCCGGAAGUAGCU | | | | | |
| | | GACCCGCGUGACU | | | | | |
| | | GGUCACGUGACCUG | | | | | |
| AB049608.1 | AB049608_3199_3277 | CGCCAUUUUAUAA | 320 | AUUUUAUAAU | 415 | CGGGGCGUGG | 510 |
| | | UACGCGCGUCCCC | | ACGCGCGUCC | | CCGUAUUAGA | |
| | | UCCCGGCUUCCGU | | CCUCC(5′) | | AAAUGG(3′) | |
| | | ACUACGUCAGGCG | | | | | |
| | | GGGCGUGGCCGUA | | | | | |
| | | UUAGAAAAUGGUG | | | | | |
| AB050448.1 | AB050448_3393_3465 | UAAGUAAGGCGGA | 321 | AAGGGACAGC | 416 | AGUAAGGCGG | 511 |
| | | ACCAGGCUGUCAC | | CUUCCGGCUU | | AACCAGGCUG | |
| | | CCUGUGUCAAAGG | | GC(3′) | | UCACCCUGU(5′) | |
| | | UCAAGGGACAGCC | | | | | |
| | | UUCCGGCUUGCAC | | | | | |
| | | AAAAUGG | | | | | |
| AB054647.1 | AB054647_3537_3615 | UGCCUACGUCAUA | 322 | CAUAAGUCAC | 417 | UAGCUGACCC | 512 |
| | | AGUCACGUGGGGA | | GUGGGGACGG | | GCGUGACUUG | |
| | | CGGCUGCUGUAAA | | CUGCU(5′) | | UCAC(3′) | |
| | | CACGGAAGUAGCU | | | | | |
| | | GACCCGCGUGACU | | | | | |
| | | UGUCACGUGAGCA | | | | | |
| AB054648.1 | AB054648_3439_3511 | UUGUGUAAGGCGG | 323 | UAAGGCGGAA | 418 | GGUCAGCCUC | 513 |
| | | AACAGGCUGACAC | | CAGGCUGACA | | CGCUUUGCA(3′) | |
| | | CCCGUGUCAAAGG | | CCCC(5′) | | | |
| | | UCAGGGGUCAGCC | | | | | |
| | | UCCGCUUUGCACC | | | | | |
| | | AAAUGGU | | | | | |
| AB054648.1 | AB054648_3538_3617 | UACCUACGUCAUAA | 324 | UACGUCAUAA | 419 | GCUGACCCGC | 514 |
| | | GUCACGUGGGAAG | | GUCACGUGGG | | GUGGCUUGUC | |
| | | AGCUGCUGUGAAC | | AAGAGCUG(5′) | | ACGUGAGU(3′) | |
| | | CUGGAAGUAGCUG | | | | | |
| | | ACCCGCGUGGCUU | | | | | |
| | | GUCACGUGAGUGC | | | | | |
| AB064595.1 | AB064595_116_191 | UUUUCCUGGCCCG | 325 | UCGGGCGUCC | 420 | GGCCCGUCCG | 515 |
| | | UCCGCGGCGAGAG | | CGAGGGCGGG | | CGGCGAGAGC | |
| | | CGCGAGCGAAGCG | | UG(3′) | | GCGAG(5′) | |
| | | AGCGAUCGGGCGU | | | | | |
| | | CCCGAGGGCGGGU | | | | | |
| | | GCCGGAGGUG | | | | | |
| AB064595.1 | AB064595_3283_3351 | AAAGUGAGUGGGG | 326 | AAAGUGAGUG | 421 | UCCGGGUGCG | 516 |
| | | CCAGACUUCGCCA | | GGGCCAGACU | | UCUGGGGGCC | |
| | | UAGGGCCUUUAAC | | UCGCC(5′) | | GCCAUUU(3′) | |
| | | UUCCGGGUGCGUC | | | | | |
| | | UGGGGGCCGCCAU | | | | | |
| | | UUU | | | | | |
| AB064595.1 | AB064595_3427_3500 | GUGACGUUACUCU | 327 | CUCUCACGUG | 422 | AUCCUCGACC | 517 |
| | | CACGUGAUGGGGG | | AUGGGGGCGU | | ACGUGACUGU | |
| | | CGUGCUCUAACCC | | GC(5′) | | G(3′) | |
| | | GGAAGCAUCCUCG | | | | | |
| | | ACCACGUGACUGU | | | | | |
| | | GACGUCAC | | | | | |
| AB064595.1 | AB064595_41_116 | AGCGUCUACUACG | 328 | UCUACUACGU | 423 | AUAAACCAGA | 518 |
| | | UACACUUCCUGGG | | ACACUUCCUG | | GGGGUGACGA | |
| | | GUGUGUCCUGCCA | | GGGUGUGU(5′) | | AUGGUAGAGU | |
| | | CUGUAUAUAAACCA | | | | (3′) | |
| | | GAGGGGUGACGAA | | | | | |
| | | UGGUAGAGU | | | | | |
| AB064596.1 | AB064596_3424_3497 | GUGACGUCAAAGU | 329 | UGGCUGUUGU | 424 | CAAAGUCACG | 519 |
| | | CACGUGGUGACGG | | CACGUGACUU | | UGGUGACGGC | |
| | | CCAUUUUAACCCG | | GA(3′) | | CAU(5′) | |
| | | GAAGUGGCUGUUG | | | | | |
| | | UCACGUGACUUGA | | | | | |
| | | CGUCACGG | | | | | |
| AB064597.1 | AB064597_3191_3253 | GCUUUAGACGCCA | 330 | AGACGCCAUU | 425 | GUAGGCGCGU | 520 |
| | | UUUUAGGCCCUCG | | UUAGGCCCUC | | UUUAAUGACG | |
| | | CGGGCACCCGUAG | | GCGG(5′) | | UCACGG(3′) | |
| | | GCGCGUUUUAAUG | | | | | |
| | | ACGUCACGGC | | | | | |
| AB064597.1 | AB064597_3221_3294 | CACCCGUAGGCGC | 331 | UGUCGUGACG | 426 | UAGGCGCGUU | 521 |
| | | GUUUUAAUGACGU | | UUUGAGACAC | | UUAAUGACGU | |
| | | CACGGCAGCCAUU | | GUGAU(3′) | | CACGGCAG(5′) | |
| | | UUGUCGUGACGUU | | | | | |
| | | UGAGACACGUGAU | | | | | |
| | | GGGGGCGU | | | | | |
| AB064597.1 | AB064597_3262_3342 | GUCGUGACGUUUG | 332 | UGACGUUUGA | 427 | AUCCCUGGUC | 522 |
| | | AGACACGUGAUGG | | GACACGUGAU | | ACGUGACUCU | |
| | | GGGCGUGCCUAAA | | GGGGGCGUGC | | GACGUCACG(3′) | |
| | | CCCGGAAGCAUCC | | (5′) | | | |
| | | CUGGUCACGUGAC | | | | | |
| | | UCUGACGUCACGG | | | | | |
| | | CG | | | | | |
| AB064598.1 | AB064598_3179_3256 | CGAAAGUGAGUGG | 333 | AGUGAGUGGG | 428 | GCGUGUGGGG | 523 |
| | | GGCCAGACUUCGC | | GCCAGACUUC | | GCCGCCAUUU | |
| | | CAUAAGGCCUUUA | | GC(5′) | | UAGCUU(3′) | |
| | | ACUUCCGGGUGCG | | | | | |
| | | UGUGGGGGCCGCC | | | | | |
| | | AUUUUAGCUUCG | | | | | |
| AB064598.1 | AB064598_3323_3399 | CUGUGACGUCAAA | 334 | UGUGACGUCA | 429 | UCAUCCUCGU | 524 |
| | | GUCACGUGGGGAG | | AAGUCACGUG | | CACGUGACCU | |
| | | GGCGGCGUGUAAC | | GGGAGGGCGG | | GACGUCACG(3′) | |
| | | CCGGAAGUCAUCC | | (5′) | | | |
| | | UCGUCACGUGACC | | | | | |
| | | UGACGUCACGG | | | | | |
| AB064598.1 | AB064598_3412_3485 | CUGUCCGCCAUCU | 335 | AAAAGAGGAA | 430 | CGCCAUCUUG | 525 |
| | | UGUGACUUCCUUC | | GUAUGACGUA | | UGACUUCCUU | |
| | | CGCUUUUUCAAAAA | | GCGGCGG(3′) | | CCGCUUUUU(5′) | |
| | | AAAAGAGGAAGUAU | | | | | |
| | | GACGUAGCGGCGG | | | | | |
| | | GGGGGC | | | | | |
| AB064599.1 | AB064599_108_175 | GGUAGAGUUUUUU | 336 | AGCGAGCGGC | 431 | UAGAGUUUUU | 526 |
| | | CCGCCCGUCCGCA | | CGAGCGACCC | | UCCGCCCGUC | |
| | | GCGAGGACGCGAG | | G(3′) | | CG(5′) | |
| | | CGCAGCGAGCGGC | | | | | |
| | | CGAGCGACCCGUG | | | | | |
| | | GG | | | | | |
| AB064599.1 | AB064599_3389_3469 | GCUGUGACGUUUC | 337 | UUCAGUCACG | 432 | GUCCCUGGUC | 527 |
| | | AGUCACGUGGGGA | | UGGGGAGGGA | | ACGUGAUUGU | |
| | | GGGAACGCCUAAA | | ACGC(5′) | | GAC(3′) | |
| | | CCCGGAAGCGUCC | | | | | |
| | | CUGGUCACGUGAU | | | | | |
| | | UGUGACGUCACGG | | | | | |
| | | CC | | | | | |
| AB064599.1 | AB064599_3483_3546 | CCGCCAUUUUGUG | 338 | AAAAGAGGAA | 433 | CAUUUUGUGA | 528 |
| | | ACUUCCUUCCGCU | | GUGUGACGUA | | CUUCCUUCCG | |
| | | UUUUCAAAAAAAAA | | GCGG(3′) | | CUUUUU(5′) | |
| | | GAGGAAGUGUGAC | | | | | |
| | | GUAGCGGCGG | | | | | |
| AB064600.1 | AB064600_3378_3456 | GACUGUGACGUCA | 339 | UGUGACGUCA | 434 | UCAUCCUCGU | 529 |
| | | AAGUCACGUGGGG | | AAGUCACGUG | | CACGUGACCU | |
| | | AGGGCGGCGUGUA | | GGGAGGGCGG | | GACGUCACG(3′) | |
| | | ACCCGGAAGUCAU | | (5′) | | | |
| | | CCUCGUCACGUGA | | | | | |
| | | CCUGACGUCACGG | | | | | |
| AB064600.1 | AB064600_3469_3542 | CUGUCCGCCAUCU | 340 | AAAAGAGGAA | 435 | CCGCCAUCUU | 530 |
| | | UGUGACUUCCUUC | | GUAUGACGUG | | GUGACUUCCU | |
| | | CGCUUUUUCAAAAA | | GCGG(3′) | | UCCGCUUUUU | |
| | | AAAAGAGGAAGUAU | | | | (5′) | |
| | | GACGUGGCGGCGG | | | | | |
| | | GGGGGC | | | | | |
| AB064601.1 | AB064601_3318_3398 | GGUUGUGACGUCA | 341 | UGACGUCAAA | 436 | AUCCUCGUCA | 531 |
| | | AAGUCACGUGGGG | | GUCACGUGGG | | CGUGACCUGA | |
| | | AGGGCGGCGUGUA | | GAGGGCGG(5′) | | CGUCACG(3′) | |
| | | ACCCGGAAGUCAU | | | | | |
| | | CCUCGUCACGUGA | | | | | |
| | | CCUGACGUCACGG | | | | | |
| | | CC | | | | | |
| AB064601.1 | AB064601_3412_3477 | CCCGCCAUCUUGU | 342 | AAAAAAGAGG | 437 | CGCCAUCUUG | 532 |
| | | GACUUCCUUCCGC | | AAGUGUGACG | | UGACUUCCUU | |
| | | UUUUUCAAAAAAAA | | UAGCGGCGG(3′) | | CCGCUUUUUC | |
| | | AGAGGAAGUGUGA | | | | (5′) | |
| | | CGUAGCGGCGGG | | | | | |
| AB064602.1 | AB064602_125_192 | GCCCGUCCGCGGC | 343 | GAUCGAGCGU | 438 | CCGUCCGCGG | 533 |
| | | GAGAGCGCGAGCG | | CCCGUGGGCG | | CGAGAGCGCG | |
| | | AAGCGAGCGAUCG | | GGU(3′) | | AGCGA(5′) | |
| | | AGCGUCCCGUGGG | | | | | |
| | | CGGGUGCCGUAGG | | | | | |
| | | UG | | | | | |
| AB064602.1 | AB064602_3368_3446 | GACUGUGACGUCA | 344 | UGUGACGUCA | 439 | UCAUCCUCGU | 534 |
| | | AAGUCACGUGGGG | | AAGUCACGUG | | CACGUGACCU | |
| | | AGGAGGGCGUGUA | | GGGAGGAGGG | | GACGUCACG(3′) | |
| | | ACCCGGAAGUCAU | | (5′) | | | |
| | | CCUCGUCACGUGA | | | | | |
| | | CCUGACGUCACGG | | | | | |
| AB064603.1 | AB064603_3385_3447 | UCGCGUCUUAGUG | 345 | UUGGUCCUGA | 440 | CUUAGUGACG | 535 |
| | | ACGUCACGGCAGC | | CGUCACUGUC | | UCACGGCAGC | |
| | | CAUCUUGGUCCUG | | A(3′) | | CAU(5′) | |
| | | ACGUCACUGUCAC | | | | | |
| | | GUGGGGAGGG | | | | | |
| AB064603.1 | AB064603_3422_3498 | UGACGUCACUGUC | 346 | CGUCACUGUC | 441 | GUCCCUGGUC | 536 |
| | | ACGUGGGGAGGGA | | ACGUGGGGAG | | ACGUGACAUG | |
| | | ACACGUGAACCCG | | GGAACAC(5′) | | ACGUC(3′) | |
| | | GAAGUGUCCCUGG | | | | | |
| | | UCACGUGACAUGA | | | | | |
| | | CGUCACGGCCG | | | | | |
| AB064604.1 | AB064604_3436_3514 | CGCCAUUUUAAGU | 347 | UAAGUAAGCA | 442 | CACAGCCGGU | 537 |
| | | AAGCAUGGCGGGC | | UGGCGGGCGG | | CAUGCUUGCA | |
| | | GGUGAUGUCAAAU | | UGAU(5′) | | CAAA(3′) | |
| | | GUUAAAGGUCACA | | | | | |
| | | GCCGGUCAUGCUU | | | | | |
| | | GCACAAAAUGGCG | | | | | |
| AB064605.1 | AB064605_3440_3518 | CGCCAUUUUAAGU | 348 | AAGUAAGCAU | 443 | ACAGCCUGUC | 538 |
| | | AAGCAUGGCGGGC | | GGCGGGCGGU | | AUGCUUGCAC | |
| | | GGUGACGUGCAAU | | GA(5′) | | AA(3′) | |
| | | GUCAAAGGUCACA | | | | | |
| | | GCCUGUCAUGCUU | | | | | |
| | | GCACAAAAUGGCG | | | | | |
| AB064606.1 | AB064606_3377_3449 | CCAUCUUAAGUAG | 349 | UAAGUAGUUG | 444 | CACCAUCAGC | 539 |
| | | UUGAGGCGGACGG | | AGGCGGACGG | | CACACCUACU | |
| | | UGGCGUCGGUUCA | | UGGC(5′) | | CAAA(3′) | |
| | | AAGGUCACCAUCA | | | | | |
| | | GCCACACCUACUC | | | | | |
| | | AAAAUGG | | | | | |
| AB064607.1 | AB064607_3502_3569 | GCCUGUCAUGCUU | 350 | UCAUGCUUGC | 445 | CGGGUCGCCG | 540 |
| | | GCACAAAAUGGCG | | ACAAAAUGGC | | CCAUAUUUGG | |
| | | GACUUCCGCUUCC | | GGACUUCCG(5′) | | UCACGUGA(3′) | |
| | | GGGUCGCCGCCAU | | | | | |
| | | AUUUGGUCACGUG | | | | | |
| | | AC | | | | | |
| AF079173.1 | AF079173_3475_3551 | GCCAUUUUAAGUA | 351 | AGUAGCUGAC | 446 | CAUCCUCGGC | 541 |
| | | GCUGACGUCAAGG | | GUCAAGGAUU | | GGAAGCUACA | |
| | | AUUGACGUAAAGG | | GAC(5′) | | CAA(3′) | |
| | | UUAAAGGUCAUCC | | | | | |
| | | UCGGCGGAAGCUA | | | | | |
| | | CACAAAAUGGU | | | | | |
| AF116842.1 | AF116842_3475_3551 | GCCAUUUUAAGUA | 352 | AGUAGCUGAC | 447 | CAUCCUCGGC | 542 |
| | | GCUGACGUCAAGG | | GUCAAGGAUU | | GGAAGCUACA | |
| | | AUUGACGUAAAGG | | GAC(5′) | | CAA(3′) | |
| | | UUAAAGGUCAUCC | | | | | |
| | | UCGGCGGAAGCUA | | | | | |
| | | CACAAAAUGGU | | | | | |
| AF116842.1 | AF116842_3579_3657 | GCAUACGUCACAA | 353 | ACAAGUCACG | 448 | GGCCCCGUCA | 543 |
| | | GUCACGUGGGGGG | | UGGGGGGGAC | | CGUGACUUAC | |
| | | GACCCGCUGUAAC | | CCG(5′) | | CAC(3′) | |
| | | CCGGAAGUAGGCC | | | | | |
| | | CCGUCACGUGACU | | | | | |
| | | UACCACGUGUGUA | | | | | |
| AF122913.1 | AF122913_3475_3551 | GCCAUUUUAAGUA | 354 | AAGUAGCUGA | 449 | UCAUCCUCGG | 544 |
| | | GCUGACGUCAAGG | | CGUCAAGGAU | | CGGAAGCUAC | |
| | | AUUGACGUGAAGG | | UGACG(5′) | | ACAA(3′) | |
| | | UUAAAGGUCAUCC | | | | | |
| | | UCGGCGGAAGCUA | | | | | |
| | | CACAAAAUGGU | | | | | |
| AF122913.1 | AF122913_3579_3657 | GCACACGUCAUAA | 355 | AUAAGUCACG | 450 | GGCCCCGUCA | 545 |
| | | GUCACGUGGUGGG | | UGGUGGGGAC | | CGUGAUUUGU | |
| | | GACCCGCUGUAAC | | CCG(5′) | | CAC(3′) | |
| | | CCGGAAGUAGGCC | | | | | |
| | | CCGUCACGUGAUU | | | | | |
| | | UGUCACGUGUGUA | | | | | |
| AF122914.1 | AF122914_3476_3552 | GCCAUUUUAAGUC | 356 | AAGUCAGCUC | 451 | GUCAUCCUCA | 546 |
| | | AGCUCUGGGGAGG | | UGGGGAGGCG | | CCAUAACUGG | |
| | | CGUGACUUCCAGU | | UGACUU(5′) | | CACAA(3′) | |
| | | UCAAAGGUCAUCC | | | | | |
| | | UCACCAUAACUGG | | | | | |
| | | CACAAAAUGGC | | | | | |
| AF122915.1 | AF122915_3475_3551 | GCCAUUUUAAGUA | 357 | AGUAGCUGAC | 452 | CAUCCUCGGC | 547 |
| | | GCUGACGUCAAGG | | GUCAAGGAUU | | GGAAGCUACA | |
| | | AUUGACGUAAAGG | | GAC(5′) | | CAA(3′) | |
| | | UUAAAGGUCAUCC | | | | | |
| | | UCGGCGGAAGCUA | | | | | |
| | | CACAAAAUGGU | | | | | |
| AF122915.1 | AF122915_3579_3657 | GCAUACGUCACAA | 358 | CAAGUCACGU | 453 | GGCCCCGUCA | 548 |
| | | GUCACGUGGAGGG | | GGAGGGGACA | | CGUGACUUAC | |
| | | GACACGCUGUAAC | | CC(5′) | | CAC(3′) | |
| | | CCGGAAGUAGGCC | | | | | |
| | | CCGUCACGUGACU | | | | | |
| | | UACCACGUGUGUA | | | | | |
| AF122916.1 | AF122916_3458_3537 | GCGCCAUGUUAAG | 359 | UGUUAAGUGG | 454 | AUCCUCGACG | 549 |
| | | UGGCUGUCGCCGA | | CUGUCGCCGA | | GUAACCGCAA | |
| | | GGAUUGACGUCAC | | GGAUUGA(5′) | | ACAUG(3′) | |
| | | AGUUCAAAGGUCA | | | | | |
| | | UCCUCGACGGUAA | | | | | |
| | | CCGCAAACAUGGC | | | | | |
| | | G | | | | | |
| AF122916.1 | AF122916_3565_3641 | CAUGCGUCAUAAG | 360 | UAAGUCACAU | 455 | GGCCCCGACA | 550 |
| | | UCACAUGACAGGG | | GACAGGGGUC | | UGUGACUCGU | |
| | | GUCCACUUAAACAC | | CA(5′) | | C(3′) | |
| | | GGAAGUAGGCCCC | | | | | |
| | | GACAUGUGACUCG | | | | | |
| | | UCACGUGUGU | | | | | |
| AF122916.1 | AF122916_91_164 | UGGCAGCACUUCC | 361 | CGGAGAGGGA | 456 | AGCACUUCCG | 551 |
| | | GAAUGGCUGAGUU | | GCCACGGAGG | | AAUGGCUGAG | |
| | | UUCCACGCCCGUC | | UG(3′) | | UUUUCCA(5′) | |
| | | CGCGGAGAGGGAG | | | | | |
| | | CCACGGAGGUGAU | | | | | |
| | | CCCGAACG | | | | | |
| AF122917.1 | AF122917_3369_3447 | GCCAUUUUAAGUC | 362 | AAGUCAGCGC | 457 | AUCCUCACCG | 552 |
| | | AGCGCUGGGGAGG | | UGGGGAGGCA | | GAACUGACAC | |
| | | CAUGACUGUAAGU | | UGA(5′) | | AA(3′) | |
| | | UCAAAGGUCAUCC | | | | | |
| | | UCACCGGAACUGA | | | | | |
| | | CACAAAAUGGCCG | | | | | |
| AF122918.1 | AF122918_3460_3540 | GCCAUCUUAAGUG | 363 | UCUUAAGUGG | 458 | CAUCCUCGGC | 553 |
| | | GCUGUCGCCGAGG | | CUGUCGCCGA | | GGUAACCGCA | |
| | | AUUGACGUCACAG | | GGAUUGAC(5′) | | AAGAUG(3′) | |
| | | UUCAAAGGUCAUC | | | | | |
| | | CUCGGCGGUAACC | | | | | |
| | | GCAAAGAUGGCGG | | | | | |
| | | UC | | | | | |
| AF122918.1 | AF122918_3566_3642 | AUACGUCAUAAGU | 364 | AAGUCACAUG | 459 | UAGGCCCCGA | 554 |
| | | CACAUGUCUAGGG | | UCUAGGGGUC | | CAUGUGACUC | |
| | | GUCCACUUAAACAC | | CACU(5′) | | GU(3′) | |
| | | GGAAGUAGGCCCC | | | | | |
| | | GACAUGUGACUCG | | | | | |
| | | UCACGUGUGU | | | | | |
| AF122919.1 | AF122919_3370_3447 | CCAUUUUAAGUAA | 365 | AAGUAAGGCG | 460 | ACAGCCUUCC | 555 |
| | | GGCGGAAGCAGCU | | GAAGCAGCUG | | GCUUUGCACA | |
| | | GUCCCUGUAACAA | | UCC(5′) | | A(3′) | |
| | | AAUGGCGGCGACA | | | | | |
| | | GCCUUCCGCUUUG | | | | | |
| | | CACAAAAUGGAG | | | | | |
| AF122920.1 | AF122920_3460_3540 | GCCAUCUUAAGUG | 366 | AUCUUAAGUG | 461 | CAUCCUCGGC | 556 |
| | | GCUGUCGCUGAGG | | GCUGUCGCUG | | GGUAACCGCA | |
| | | AUUGACGUCACAG | | AGGAUUGAC(5′) | | AAGAUGG(3′) | |
| | | UUCAAAGGUCAUC | | | | | |
| | | CUCGGCGGUAACC | | | | | |
| | | GCAAAGAUGGCGG | | | | | |
| | | UC | | | | | |
| AF122920.1 | AF122920_3565_3641 | CAUACGUCAUAAG | 367 | UAAGUCACAU | 462 | UAGGCCCCGA | 557 |
| | | UCACAUGACAGGA | | GACAGGAGUC | | CAUGUGACUC | |
| | | GUCCACUUAAACAC | | CACU(5′) | | GUC(3′) | |
| | | GGAAGUAGGCCCC | | | | | |
| | | GACAUGUGACUCG | | | | | |
| | | UCACGUGUGU | | | | | |
| AF122921.1 | AF122921_3459_3540 | CGCCAUCUUAAGU | 368 | AAGUGGCUGU | 463 | UCCUCGGCGG | 558 |
| | | GGCUGUCGCCGAG | | CGCCGAGGAU | | UAACCGCAAA | |
| | | GAUUGGCGUCACA | | UG(5′) | | (3′) | |
| | | GUUCAAAGGUCAU | | | | | |
| | | CCUCGGCGGUAAC | | | | | |
| | | CGCAAAGAUGGCG | | | | | |
| | | GU | | | | | |
| AF122921.1 | AF122921_3565_3641 | CAUACGUCAUAAG | 369 | UAAGUCACAU | 464 | GGCCCCGACA | 559 |
| | | UCACAUGACAGGG | | GACAGGGGUC | | UGUGACUCGU | |
| | | GUCCACUUAAACAC | | CA(5′) | | C(3′) | |
| | | GGAAGUAGGCCCC | | | | | |
| | | GACAUGUGACUCG | | | | | |
| | | UCACGUGUGU | | | | | |
| AF129887.1 | AF129887_3579_3657 | GCAUACGUCACAA | 370 | ACAAGUCACG | 465 | GGCCCCGUCA | 560 |
| | | GUCACGUGGGGGG | | UGGGGGGGAC | | CGUGACUUAC | |
| | | GACCCGCUGUAAC | | CCG(5′) | | CAC(3′) | |
| | | CCGGAAGUAGGCC | | | | | |
| | | CCGUCACGUGACU | | | | | |
| | | UACCACGUGGUGU | | | | | |
| AF247137.1 | AF247137_3453_3530 | CCGCCAUUUUAGG | 371 | AUUUUAGGCU | 466 | UCAAACACCC | 561 |
| | | CUGUUGCCGGGCG | | GUUGCCGGGC | | AGCGACACCA | |
| | | UUUGACUUCCGUG | | GUUUGACU(5′) | | AAAAAUGG(3′) | |
| | | UUAAAGGUCAAACA | | | | | |
| | | CCCAGCGACACCA | | | | | |
| | | AAAAAUGGCCG | | | | | |
| AF247137.1 | AF247137_3559_3636 | CUACGUCAUAAGU | 372 | AUAAGUCACG | 467 | CCUCGCCCAC | 562 |
| | | CACGUGACAGGGA | | UGACAGGGAG | | GUGACUUACC | |
| | | GGGGCGACAAACC | | GGG(5′) | | AC(3′) | |
| | | CGGAAGUCAUCCU | | | | | |
| | | CGCCCACGUGACU | | | | | |
| | | UACCACGUGGUG | | | | | |
| AF247138.1 | AF247138_3455_3532 | GCCAUUUUAAGUA | 373 | AAGUAGGUGA | 468 | CCUCGGCGGA | 563 |
| | | GGUGACGUCCAGG | | CGUCCAGGAC | | ACCUAUACAA | |
| | | ACUGACGUAAAGU | | U(5′) | | (3′) | |
| | | UCAAAGGUCAUCC | | | | | |
| | | UCGGCGGAACCUA | | | | | |
| | | UACAAAAUGGCG | | | | | |
| AF247138.1 | AF247138_3561_3637 | CUACGUCAUAAGU | 374 | CAUAAGUCAC | 469 | GCCCCGUCAC | 564 |
| | | CACGUGGGGACGG | | GUGGGGACGG | | GUGAUUUACC | |
| | | CUGUACUUAAACAC | | CUGU(5′) | | AC(3′) | |
| | | GGAAGUAGGCCCC | | | | | |
| | | GUCACGUGAUUUA | | | | | |
| | | CCACGUGGUG | | | | | |
| AF261761.1 | AF261761_3431_3504 | GCCAUUUUAAGUA | 375 | UAAGUAAGGC | 470 | GCGGCGGAGC | 565 |
| | | AGGCGGAAGAGCU | | GGAAGAGCUC | | ACUUCCGCUU | |
| | | CUAGCUAUACAAAA | | UAGCUA(5′) | | UGCCCAAA(3′) | |
| | | UGGCGGCGGAGCA | | | | | |
| | | CUUCCGCUUUGCC | | | | | |
| | | CAAAAUG | | | | | |
| AF351132.1 | AF351132_3475_3552 | GCCAUUUUAAGUA | 376 | AGUAGCUGAC | 471 | CAUCCUCGGC | 566 |
| | | GCUGACGUCAAGG | | GUCAAGGAUU | | GGAAGCUACA | |
| | | AUUGACGUAGAGG | | GAC(5′) | | CAA(3′) | |
| | | UUAAAGGUCAUCC | | | | | |
| | | UCGGCGGAAGCUA | | | | | |
| | | CACAAAAUGGUG | | | | | |
| AF351132.1 | AF351132_3579_3657 | GCAUACGUCACAA | 377 | ACAAGUCACG | 472 | GGCCCCGUCA | 567 |
| | | GUCACGUGGGGGG | | UGGGGGGGAC | | CGUGACUUAC | |
| | | GACCCGCUGUAAC | | CCG(5′) | | CAC(3′) | |
| | | CCGGAAGUAGGCC | | | | | |
| | | CCGUCACGUGACU | | | | | |
| | | UACCACGUGUGUA | | | | | |
| AF435014.1 | AF435014_3344_3426 | GGCGCCAUUUUAA | 378 | UAAGUAAGCA | 473 | CACCGCACUU | 568 |
| | | GUAAGCAUGGCGG | | UGGCGGGCGG | | CCGUGCUUGC | |
| | | GCGGCGACGUCAC | | CGAC(5′) | | ACAAA(3′) | |
| | | AUGUCAAAGGUCA | | | | | |
| | | CCGCACUUCCGUG | | | | | |
| | | CUUGCACAAAAUG | | | | | |
| | | GC | | | | | |
| AF435014.1 | AF435014_3453_3526 | UGCUACGUCAUCG | 379 | AUCGAGACAC | 474 | UCGCUGACAC | 569 |
| | | AGACACGUGGUGC | | GUGGUGCCAG | | ACGUGUCUUG | |
| | | CAGCAGCUGUAAA | | CAGCU(5′) | | UCAC(3′) | |
| | | CCCGGAAGUCGCU | | | | | |
| | | GACACACGUGUCU | | | | | |
| | | UGUCACGU | | | | | |
| AJ620212.1 | AJ620212_3360_3438 | GCCAUUUUAAGUA | 380 | UCAUCCUCAG | 475 | CAUUUUAAGU | 570 |
| | | AGCACCGCCUAGG | | CCGGAACUUA | | AAGCACCGCC | |
| | | GAUGACGUAUAAG | | CACAAAAUGG | | UAGGGAUGAC | |
| | | UUCAAAGGUCAUC | | (3′) | | (5′) | |
| | | CUCAGCCGGAACU | | | | | |
| | | UACACAAAAUGGU | | | | | |
| AJ620212.1 | AJ620212_3470_3542 | ACGUCAUAUGUCA | 381 | AUAUGUCACG | 476 | GUAGGCCCCG | 571 |
| | | CGUGGGGAGGCCC | | UGGGGAGGCC | | UCACGUGUCA | |
| | | UGCUGCGCAAACG | | CUGCUG(5′) | | UACCAC(3′) | |
| | | CGGAAGUAGGCCC | | | | | |
| | | CGUCACGUGUCAU | | | | | |
| | | ACCACGU | | | | | |
| AJ620218.1 | AJ620218_3381_3458 | CCAUUUUAAGUAA | 382 | AAGUAAGGCG | 477 | GGCGGGGCAC | 572 |
| | | GGCGGAAGCAGCU | | GAAGCAGCUC | | UUCCGGCUUG | |
| | | CCACUUUCUCACAA | | CACUUU(5′) | | CCCAA(3′) | |
| | | AAUGGCGGCGGGG | | | | | |
| | | CACUUCCGGCUUG | | | | | |
| | | CCCAAAAUGGC | | | | | |
| AJ620226.1 | AJ620226_3451_3523 | CCAUUUUAAGUAA | 383 | AAGUAAGGCG | 478 | CGGCGGAGCA | 573 |
| | | GGCGGAAGUUUCU | | GAAGUUUCUC | | CUUCCGGCUU | |
| | | CCACUAUACAAAAU | | CACU(5′) | | GCCCAA(3′) | |
| | | GGCGGCGGAGCAC | | | | | |
| | | UUCCGGCUUGCCC | | | | | |
| | | AAAAUG | | | | | |
| AJ620227.1 | AJ620227_3379_3451 | CCAUCUUAAGUAG | 384 | UAAGUAGUUG | 479 | CACCAUCAGC | 574 |
| | | UUGAGGCGGACGG | | AGGCGGACGG | | CACACCUACU | |
| | | UGGCGUGAGUUCA | | UGGC(5′) | | CAAA(3′) | |
| | | AAGGUCACCAUCA | | | | | |
| | | GCCACACCUACUC | | | | | |
| | | AAAAUGG | | | | | |
| AJ620231.1 | AJ620231_3429_3505 | CGCCAUCUUAAGU | 385 | UAAGUAGUUG | 480 | ACCAUCAGCC | 575 |
| | | AGUUGAGGCGGAC | | AGGCGGACGG | | ACACCUACUC | |
| | | GGUGGCGUGAGUU | | UGG(5′) | | AAA(3′) | |
| | | CAAAGGUCACCAU | | | | | |
| | | CAGCCACACCUAC | | | | | |
| | | UCAAAAUGGUG | | | | | |
| AY666122.1 | AY666122_3163_3236 | UUUCGGACCUUCG | 386 | GACCUUCGGC | 481 | GACUCCGAGA | 576 |
| | | GCGUCGGGGGGGU | | GUCGGGGGG | | UGCCAUUGGA | |
| | | CGGGGGCUUUACU | | GUCGGGGG(5′) | | CACUGAGG(3′) | |
| | | AAACAGACUCCGA | | | | | |
| | | GAUGCCAUUGGAC | | | | | |
| | | ACUGAGGG | | | | | |
| AY666122.1 | AY666122_3388_3464 | CCAUUUUAAGUAG | 387 | AUCCUCGGCG | 482 | AGUAGGUGCC | 577 |
| | | GUGCCGUCCAGCA | | GAACCUAUA(3′) | | GUCCAGCA(5′) | |
| | | CUGCUGUUCCGGG | | | | | |
| | | UUAAAGGGCAUCC | | | | | |
| | | UCGGCGGAACCUA | | | | | |
| | | UACAAAAUGGC | | | | | |
| AY666122.1 | AY666122_3494_3567 | CUACGUCAUCGAU | 388 | AUCGAUGACG | 483 | AAGUAGGCCC | 578 |
| | | GACGUGGGGAGGC | | UGGGGAGGCG | | CGCUACGUCA | |
| | | GUACUAUGAAACG | | UACUAU(5′) | | UCAUCAC(3′) | |
| | | CGGAAGUAGGCCC | | | | | |
| | | CGCUACGUCAUCA | | | | | |
| | | UCACGUGG | | | | | |
| AY823988.1 | AY823988_3452_3525 | CCAUUUUAAGUAA | 389 | UGGCGGAGGA | 484 | AAGGCGGAAG | 579 |
| | | GGCGGAAGAGCUG | | GCACUUCCGG | | AGCUGCUCUA | |
| | | CUCUAUAUACAAAA | | CUUG(3′) | | UAU(5′) | |
| | | UGGCGGAGGAGCA | | | | | |
| | | CUUCCGGCUUGCC | | | | | |
| | | CAAAAUG | | | | | |
| AY823988.1 | AY823988_3554_3629 | UGCCUACGUAACA | 390 | AACAAGUCAC | 485 | CAAUCCUCCC | 580 |
| | | AGUCACGUGGGGA | | GUGGGGAGGG | | ACGUGGCCUG | |
| | | GGGUUGGCGUAUA | | UUGGC(5′) | | UCAC(3′) | |
| | | ACCCGGAAGUCAA | | | | | |
| | | UCCUCCCACGUGG | | | | | |
| | | CCUGUCACGU | | | | | |
| AY823989.1 | AY823989_3551_3623 | UAAGUAAGGCGGA | 391 | AGGGGUCAGC | 486 | AAGGCGGAAC | 581 |
| | | ACCAGGCUGUCAC | | CUUCCGCUUU | | CAGGCUGUCA | |
| | | CCCGUGUCAAAGG | | A(3′) | | CCCCGU(5′) | |
| | | UCAGGGGUCAGCC | | | | | |
| | | UUCCGCUUUACAC | | | | | |
| | | AAAAUGG | | | | | |
| AY823989.1 | AY823989_3551_3623 | UAAGUAAGGCGGA | 392 | AGGGGUCAGC | 487 | AAGGCGGAAC | 582 |
| | | ACCAGGCUGUCAC | | CUUCCGCUUU | | CAGGCUGUCA | |
| | | CCCGUGUCAAAGG | | A(3′) | | CCCCGU(5′) | |
| | | UCAGGGGUCAGCC | | | | | |
| | | UUCCGCUUUACAC | | | | | |
| | | AAAAUGG | | | | | |
| DQ361268.1 | DQ361268_3413_3494 | GCAGCCAUUUUAA | 393 | UAAGUCAGCU | 488 | CAUCCUCACC | 583 |
| | | GUCAGCUUCGGGG | | UCGGGGAGGG | | GGAACUGGUA | |
| | | AGGGUCACGCAAA | | UCAC(5′) | | CAAA(3′) | |
| | | GUUCAAAGGUCAU | | | | | |
| | | CCUCACCGGAACU | | | | | |
| | | GGUACAAAAUGGC | | | | | |
| | | CG | | | | | |
| DQ361268.1 | DQ361268_3519_3593 | UGCUACGUCAUAA | 394 | UCAUAAGUGA | 489 | UAGGCCCCGC | 584 |
| | | GUGACGUAGCUGG | | CGUAGCUGGU | | CACGUCACUU | |
| | | UGUCUGCUGUAAA | | GUCUGCU(5′) | | GUCACG(3′) | |
| | | CACGGAAGUAGGC | | | | | |
| | | CCCGCCACGUCAC | | | | | |
| | | UUGUCACGU | | | | | |

[0435] siRNAs and shRNAs resemble intermediates in the processing pathway of the endogenous microRNA (miRNA) genes (Bartel, Cell 116:281-297, 2004). In some embodiments, siRNAs can function as miRNAs and vice versa (Zeng et al., Mol Cell 9:1327-1333, 2002; Doench et al., Genes Dev 17:438-442, 2003). MicroRNAs, like siRNAs, use RISC to downregulate target genes, but unlike siRNAs, most animal miRNAs do not cleave the mRNA. Instead, miRNAs reduce protein output through translational suppression or polyA removal and mRNA degradation (Wu et al., Proc Natl Acad Sci USA 103:4034-4039, 2006). Known miRNA binding sites are within mRNA 3′ UTRs; miRNAs seem to target sites with near-perfect complementarity to nucleotides 2-8 from the miRNA's 5′ end (Rajewsky, Nat Genet 38 Suppl:S8-13, 2006; Lim et al., Nature 433:769-773, 2005). This region is known as the seed region. Because siRNAs and miRNAs are interchangeable, exogenous siRNAs downregulate mRNAs with seed complementarity to the siRNA (Birmingham et al., Nat Methods 3:199-204, 2006. Multiple target sites within a 3′ UTR give stronger downregulation (Doench et al., Genes Dev 17:438-442, 2003).

[0436] Lists of known miRNA sequences can be found in databases maintained by research organizations, such as Wellcome Trust Sanger Institute, Penn Center for Bioinformatics, Memorial Sloan Kettering Cancer Center, and European Molecule Biology Laboratory, among others. Known effective siRNA sequences and cognate binding sites are also well represented in the relevant literature. RNAi molecules are readily designed and produced by technologies known in the art. In addition, there are computational tools that increase the chance of finding effective and specific sequence motifs (Lagana et al., Methods Mol. Bio., 2015, 1269:393-412).

[0437] The regulatory nucleic acid may modulate expression of RNA encoded by a gene. Because multiple genes can share some degree of sequence homology with each other, in some embodiments, the regulatory nucleic acid can be designed to target a class of genes with sufficient sequence homology. In some embodiments, the regulatory nucleic acid can contain a sequence that has complementarity to sequences that are shared amongst different gene targets or are unique for a specific gene target. In some embodiments, the regulatory nucleic acid can be designed to target conserved regions of an RNA sequence having homology between several genes thereby targeting several genes in a gene family (e.g., different gene isoforms, splice variants, mutant genes, etc.). In some embodiments, the regulatory nucleic acid can be designed to target a sequence that is unique to a specific RNA sequence of a single gene.

[0438] In some embodiments, the genetic element may include one or more sequences that encode regulatory nucleic acids that modulate expression of one or more genes.

[0439] In one embodiment, the gRNA described elsewhere herein are used as part of a CRISPR system for gene editing. For the purposes of gene editing, the curon may be designed to include one or multiple guide RNA sequences corresponding to a desired target DNA sequence; see, for example, Cong et al. (2013) Science, 339:819-823; Ran et al. (2013) Nature Protocols, 8:2281-2308. At least about 16 or 17 nucleotides of gRNA sequence generally allow for Cas9-mediated DNA cleavage to occur; for Cpf1 at least about 16 nucleotides of gRNA sequence is needed to achieve detectable DNA cleavage.

[0440] Therapeutic Peptides or Polypeptides

[0441] In some embodiments, the genetic element comprises a sequence that encodes a therapeutic peptide or polypeptide. Such therapeutics include, but are not limited to, small peptides, peptidomimetics (e.g., peptoids), amino acids, and amino acid analogs. Such therapeutics generally have a molecular weight less than about 5,000 grams per mole, a molecular weight less than about 2,000 grams per mole, a molecular weight less than about 1,000 grams per mole, a molecular weight less than about 500 grams per mole, and salts, esters, and other pharmaceutically acceptable forms of such compounds. Such therapeutics may include, but are not limited to, a neurotransmitter, a hormone, a drug, a toxin, a viral or microbial particle, a synthetic molecule, and agonists or antagonists thereof.

[0442] In some embodiments, the genetic element includes a sequence encoding a peptide e.g., a therapeutic peptide. The peptides may be linear or branched. The peptide has a length from about 5 to about 500 amino acids, about 15 to about 400 amino acids, about 20 to about 325 amino acids, about 25 to about 250 amino acids, about 50 to about 150 amino acids, or any range therebetween.

[0443] Some examples of peptides include, but are not limited to, fluorescent tag or marker, antigen, peptide therapeutic, synthetic or analog peptide from naturally-bioactive peptide, agonist or antagonist peptide, anti-microbial peptide, a targeting or cytotoxic peptide, a degradation or self-destruction peptide, and degradation or self-destruction peptides. Peptides useful in the invention described herein also include antigen-binding peptides, e.g., antigen binding antibody or antibody-like fragments, such as single chain antibodies, nanobodies (see, e.g., Steeland et al. 2016. Nanobodies as therapeutics: big opportunities for small antibodies. Drug Discov Today: 21(7):1076-113). Such antigen binding peptides may bind a cytosolic antigen, a nuclear antigen, or an intra-organellar antigen.

[0444] In some embodiments, the genetic element includes a sequence encoding a protein e.g., a therapeutic protein. Some examples of therapeutic proteins may include, but are not limited to, a hormone, a cytokine, an enzyme, an antibody, a transcription factor, a receptor (e.g., a membrane receptor), a ligand, a membrane transporter, a secreted protein, a peptide, a carrier protein, a structural protein, a nuclease, or a component thereof.

[0445] In some embodiments, the composition or curon described herein includes a polypeptide linked to a ligand that is capable of targeting a specific location, tissue, or cell.

[0446] Regulatory Sequences

[0447] In some embodiments, the genetic element comprises a regulatory sequence, e.g., a promoter or an enhancer.

[0448] In some embodiments, a promoter includes a DNA sequence that is located adjacent to a DNA sequence that encodes an expression product. A promoter may be linked operatively to the adjacent DNA sequence. A promoter typically increases an amount of product expressed from the DNA sequence as compared to an amount of the expressed product when no promoter exists. A promoter from one organism can be utilized to enhance product expression from the DNA sequence that originates from another organism. For example, a vertebrate promoter may be used for the expression of jellyfish GFP in vertebrates. In addition, one promoter element can increase an amount of products expressed for multiple DNA sequences attached in tandem. Hence, one promoter element can enhance the expression of one or more products. Multiple promoter elements are well-known to persons of ordinary skill in the art.

[0449] In one embodiment, high-level constitutive expression is desired. Examples of such promoters include, without limitation, the retroviral Rous sarcoma virus (RSV) long terminal repeat (LTR) promoter/enhancer, the cytomegalovirus (CMV) immediate early promoter/enhancer (see, e.g., Boshart et al, Cell, 41:521-530 (1985)), the SV40 promoter, the dihydrofolate reductase promoter, the cytoplasmic .beta.-actin promoter and the phosphoglycerol kinase (PGK) promoter.

[0450] In another embodiment, inducible promoters may be desired. Inducible promoters are those which are regulated by exogenously supplied compounds, either in cis or in trans, including without limitation, the zinc-inducible sheep metallothionine (MT) promoter; the dexamethasone (Dex)-inducible mouse mammary tumor virus (MMTV) promoter; the T7 polymerase promoter system (WO 98/10088); the tetracycline-repressible system (Gossen et al, Proc. Natl. Acad. Sci. USA, 89:5547-5551 (1992)); the tetracycline-inducible system (Gossen et al., Science, 268:1766-1769 (1995); see also Harvey et al., Curr. Opin. Chem. Biol., 2:512-518 (1998)); the RU486-inducible system (Wang et al., Nat. Biotech., 15:239-243 (1997) and Wang et al., Gene Ther., 4:432-441 (1997)]; and the rapamycin-inducible system (Magari et al., J. Clin. Invest., 100:2865-2872 (1997); Rivera et al., Nat. Medicine. 2:1028-1032 (1996)). Other types of inducible promoters which may be useful in this context are those which are regulated by a specific physiological state, e.g., temperature, acute phase, or in replicating cells only.

[0451] In some embodiments, a native promoter for a gene or nucleic acid sequence of interest is used. The native promoter may be used when it is desired that expression of the gene or the nucleic acid sequence should mimic the native expression. The native promoter may be used when expression of the gene or other nucleic acid sequence must be regulated temporally or developmentally, or in a tissue-specific manner, or in response to specific transcriptional stimuli. In a further embodiment, other native expression control elements, such as enhancer elements, polyadenylation sites or Kozak consensus sequences may also be used to mimic the native expression.

[0452] In some embodiments, the genetic element comprises a gene operably linked to a tissue-specific promoter. For instance, if expression in skeletal muscle is desired, a promoter active in muscle may be used. These include the promoters from genes encoding skeletal α-actin, myosin light chain 2A, dystrophin, muscle creatine kinase, as well as synthetic muscle promoters with activities higher than naturally-occurring promoters. See Li et al., Nat. Biotech., 17:241-245 (1999). Examples of promoters that are tissue-specific are known for liver albumin, Miyatake et al. J. Virol., 71:5124-32 (1997); hepatitis B virus core promoter, Sandig et al., Gene Ther. 3:1002-9 (1996); alpha-fetoprotein (AFP), Arbuthnot et al., Hum. Gene Ther., 7:1503-14 (1996)], bone (osteocalcin, Stein et al., Mol. Biol. Rep., 24:185-96 (1997); bone sialoprotein, Chen et al., J. Bone Miner. Res. 11:654-64 (1996)), lymphocytes (CD2, Hansal et al., J. Immunol., 161:1063-8 (1998); immunoglobulin heavy chain; T cell receptor a chain), neuronal (neuron-specific enolase (NSE) promoter, Andersen et al. Cell. Mol. Neurobiol., 13:503-15 (1993); neurofilament light-chain gene, Piccioli et al., Proc. Natl. Acad. Sci. USA, 88:5611-5 (1991); the neuron-specific vgf gene, Piccioli et al., Neuron, 15:373-84 (1995)]; among others.

[0453] The genetic element may include an enhancer, e.g., a DNA sequence that is located adjacent to the DNA sequence that encodes a gene. Enhancer elements are typically located upstream of a promoter element or can be located downstream of or within a coding DNA sequence (e.g., a DNA sequence transcribed or translated into a product or products). Hence, an enhancer element can be located 100 base pairs, 200 base pairs, or 300 or more base pairs upstream or downstream of a DNA sequence that encodes the product. Enhancer elements can increase an amount of recombinant product expressed from a DNA sequence above increased expression afforded by a promoter element. Multiple enhancer elements are readily available to persons of ordinary skill in the art.

[0454] In some embodiments, the genetic element comprises one or more inverted terminal repeats (ITR) flanking the sequences encoding the expression products described herein. In some embodiments, the genetic element comprises one or more long terminal repeats (LTR) flanking the sequence encoding the expression products described herein. Examples of promoter sequences that may be used, include, but are not limited to, the simian virus 40 (SV40) early promoter, mouse mammary tumor virus (MMTV), human immunodeficiency virus (HIV) long terminal repeat (LTR) promoter, MoMuLV promoter, an avian leukemia virus promoter, an Epstein-Barr virus immediate early promoter, and a Rous sarcoma virus promoter.

[0455] Replication Proteins

[0456] In some embodiments, the genetic element of the curon, e.g., synthetic curon, may include sequences that encode one or more replication proteins. In some embodiments, the curon may replicate by a rolling-circle replication method, e.g., synthesis of the leading strand and the lagging strand is uncoupled. In such embodiments, the curon comprises three elements additional elements: i) a gene encoding an initiator protein, ii) a double strand origin, and iii) a single strand origin. A rolling circle replication (RCR) protein complex comprising replication proteins binds to the leading strand and destabilizes the replication origin. The RCR complex cleaves the genome to generate a free 3′OH extremity. Cellular DNA polymerase initiates viral DNA replication from the free 3′OH extremity. After the genome has been replicated, the RCR complex closes the loop covalently. This leads to the release of a positive circular single-stranded parental DNA molecule and a circular double-stranded DNA molecule composed of the negative parental strand and the newly synthesized positive strand. The single-stranded DNA molecule can be either encapsidated or involved in a second round of replication. See for example, Virology Journal 2009, 6:60 doi:10.1186/1743-422X-6-60.

[0457] The genetic element may comprise a sequence encoding a polymerase, e.g., RNA polymerase or a DNA polymerase.

[0458] Other Sequences

[0459] In some embodiments, the genetic element further includes a nucleic acid encoding a product (e.g., a ribozyme, a therapeutic mRNA encoding a protein, an exogenous gene).

[0460] In some embodiments, the genetic element includes one or more sequences that affect species and/or tissue and/or cell tropism (e.g. capsid protein sequences), infectivity (e.g. capsid protein sequences), immunosuppression/activation (e.g. regulatory nucleic acids), viral genome binding and/or packaging, immune evasion (non-immunogenicity and/or tolerance), pharmacokinetics, endocytosis and/or cell attachment, nuclear entry, intracellular modulation and localization, exocytosis modulation, propagation, and nucleic acid protection of the curon in a host or host cell.

[0461] In some embodiments, the genetic element may comprise other sequences that include DNA, RNA, or artificial nucleic acids. The other sequences may include, but are not limited to, genomic DNA, cDNA, or sequences that encode tRNA, mRNA, rRNA, miRNA, gRNA, siRNA, or other RNAi molecules. In one embodiment, the genetic element includes a sequence encoding an siRNA to target a different loci of the same gene expression product as the regulatory nucleic acid. In one embodiment, the genetic element includes a sequence encoding an siRNA to target a different gene expression product as the regulatory nucleic acid.

[0462] In some embodiments, the genetic element further comprises one or more of the following sequences: a sequence that encodes one or more miRNAs, a sequence that encodes one or more replication proteins, a sequence that encodes an exogenous gene, a sequence that encodes a therapeutic, a regulatory sequence (e.g., a promoter, enhancer), a sequence that encodes one or more regulatory sequences that targets endogenous genes (siRNA, lncRNAs, shRNA), and a sequence that encodes a therapeutic mRNA or protein.

[0463] The other sequences may have a length from about 2 to about 5000 nts, about 10 to about 100 nts, about 50 to about 150 nts, about 100 to about 200 nts, about 150 to about 250 nts, about 200 to about 300 nts, about 250 to about 350 nts, about 300 to about 500 nts, about 10 to about 1000 nts, about 50 to about 1000 nts, about 100 to about 1000 nts, about 1000 to about 2000 nts, about 2000 to about 3000 nts, about 3000 to about 4000 nts, about 4000 to about 5000 nts, or any range therebetween.

[0464] Exogenous Gene

[0465] For example, the genetic element may include a gene associated with a signaling biochemical pathway, e.g., a signaling biochemical pathway-associated gene or polynucleotide. Examples include a disease associated gene or polynucleotide. A “disease-associated” gene or polynucleotide refers to any gene or polynucleotide which is yielding transcription or translation products at an abnormal level or in an abnormal form in cells derived from a disease-affected tissues compared with tissues or cells of a non disease control. It may be a gene that becomes expressed at an abnormally high level; it may be a gene that becomes expressed at an abnormally low level, where the altered expression correlates with the occurrence and/or progression of the disease. A disease-associated gene also refers to a gene possessing mutation(s) or genetic variation that is directly responsible or is in linkage disequilibrium with a gene(s) that is responsible for the etiology of a disease.

[0466] Examples of disease-associated genes and polynucleotides are available from McKusick-Nathans Institute of Genetic Medicine, Johns Hopkins University (Baltimore, Md.) and National Center for Biotechnology Information, National Library of Medicine (Bethesda, Md.). Examples of disease-associated genes and polynucleotides are listed in Tables A and B of U.S. Pat. No. 8,697,359, which are herein incorporated by reference in their entirety. Disease specific information is available from McKusick-Nathans Institute of Genetic Medicine, Johns Hopkins University (Baltimore, Md.) and National Center for Biotechnology Information, National Library of Medicine (Bethesda, Md.). Examples of signaling biochemical pathway-associated genes and polynucleotides are listed in Tables A-C of U.S. Pat. No. 8,697,359, which are herein incorporated by reference in their entirety.

[0467] Moreover, the genetic elements can encode targeting moieties, as described elsewhere herein. This can be achieved, e.g., by inserting a polynucleotide encoding a sugar, a glycolipid, or a protein, such as an antibody. Those skilled in the art know additional methods for generating targeting moieties.

[0468] Viral Sequence

[0469] In some embodiments, the genetic element comprises at least one viral sequence. In some embodiments, the sequence has homology or identity to one or more sequence from a single stranded DNA virus, e.g., Anellovirus, Bidnavirus, Circovirus, Geminivirus, Genomovirus, Inovirus, Microvirus, Nanovirus, Parvovirus, and Spiravirus. In some embodiments, the sequence has homology or identity to one or more sequence from a double stranded DNA virus, e.g., Adenovirus, Ampullavirus, Ascovirus, Asfarvirus, Baculovirus, Fusellovirus, Globulovirus, Guttavirus, Hytrosavirus, Herpesvirus, Iridovirus, Lipothrixvirus, Nimavirus, and Poxvirus. In some embodiments, the sequence has homology or identity to one or more sequence from an RNA virus, e.g., Alphavirus, Furovirus, Hepatitis virus, Hordeivirus, Tobamovirus, Tobravirus, Tricornavirus, Rubivirus, Birnavirus, Cystovirus, Partitivirus, and Reovirus.

[0470] In some embodiments, the genetic element may comprise one or more sequences from a non-pathogenic virus, e.g., a symbiotic virus, e.g., a commensal virus, e.g., a native virus, e.g., an anellovirus. Recent changes in nomenclature have classified the three anelloviruses able to infect human cells into Alphatorquevirus (TT), Betatorquevirus (TTM), and Gammatorquevirus (TTMD) Genera of the Anelloviridae family of viruses. To date anelloviruses have not been linked to any human disease. In some embodiments, the genetic element may comprise a sequence with homology or identity to a Torque Teno Virus (TT), a non-enveloped, single-stranded DNA virus with a circular, negative-sense genome. In some embodiments, the genetic element may comprise a sequence with homology or identity to a SEN virus, a Sentinel virus, a TTV-like mini virus, and a TT virus. Different types of TT viruses have been described including TT virus genotype 6, TT virus group, TTV-like virus DXL1, and TTV-like virus DXL2. In some embodiments, the genetic element may comprise a sequence with homology or identity to a smaller virus, Torque Teno-like Mini Virus (TTM), or a third virus with a genomic size in between that of TTV and TTMV, named Torque Teno-like Midi Virus (TTMD). In some embodiments, the genetic element may comprise one or more sequences or a fragment of a sequence from a non-pathogenic virus having at least about 60%, 70% 80%, 85%, 90% 95%, 96%, 97%, 98% and 99% nucleotide sequence identity to any one of the nucleotide sequences described herein, e.g., Table 19.

TABLE 19
Examples of viral sequences, e.g., encoding capsid proteins. The first
column identifies the strain by its complete genome accession number.
The second column identifies the accession number of the protein
encoded by the ORF listed in the third column. The fourth column shows
the nucleic acid sequence encoding the ORF listed in the third column.

| | | | | SEQ ID |
|---|---|---|---|---|
| Strain # | Accession # | ORF # | Sequence | NO: |
| AF079173.1 | AAC28466.1 | ORF2 | ATGGCTGAGTTTTCCACGCCCGTCCGCAGCGGTGA | 585 |
| | | | AGCCACGGAGGGAGATCACCGCGTCCCGAGGGCG | |
| | | | GGTGCCGAAGGTGAGTTTACACACCGAAGTCAAGG | |
| | | | GGCAATTCGGGCTCGGGACTGGCCGGGCTATGGGC | |
| | | | AAGGCTCTGAAAAAAGCATGTTTATTGGCAGGCATT | |
| | | | ACAGAAAGAAAAGGGCGCTGTCACTGTGTGCTGTG | |
| | | | CGAACAACAAAGAAGGCTTGCAAACTACTAATAGTA | |
| | | | ATGTGGACCCCACCTCGCAATGATCAACAGTACCTT | |
| | | | AACTGGCAATGGTACTCAAGTGTACTTAGCCCCCAC | |
| | | | GCTGCTATGTGCGGGTGTCCCGACGCTGTCGCTCA | |
| | | | TTTTAATCATCTTGCTTCTGTGCTTCGTGCCCCGCAA | |
| | | | AACCCACCCCCTCCCGGTCCCCAGCGAAACCTGCC | |
| | | | CCTCCGACGGCTGCCGGCTCTCCCGGCTGCGCCAG | |
| | | | AGGCGCCCGGAGATAGAGCACCATGGCCTATGGCT | |
| | | | GGTGGCGCCGAAGGAGAAGACGGTGGCGCAGGTG | |
| | | | GAGACCCAGACCATGGAGGCCCCGCTGGAGGACCC | |
| | | | GAAGACGCAGACCTGCTAGACGCCGTGGCCACCGC | |
| | | | AGAAACGTAA | |
| AF129887.1 | AAD20025.1 | ORF2 | ATGGCTGGGTTTTCCACGCCCGTCCGCAGCGGTGA | 586 |
| | | | AGCCACGGAGGGAGCTCAGCGCGTCCCGAGGGCG | |
| | | | GGTGCCGAAGGTGAGTTTACACACCGCAGTCAAGG | |
| | | | GGCAATTCGGGCTCGGGACTGGCCGGGCTATGGGC | |
| | | | AAGACTCTGAAAAATGCATTTTTATCGGCAGGCATTA | |
| | | | CAGAAAGAAAAAGGCACTGTCACTGTGTGCAGTGCG | |
| | | | AGCAACACAGAAGGCTTGCAAACTTCTAAAAGTTAT | |
| | | | GTGGAGCCCTCCCCGCAACGATGAACATTACCTTAA | |
| | | | GGGACAATGGTACTCAAGTATACTTAGCTCTCACTC | |
| | | | TGCTTTCTGTGGCTGCCCCGATGCTGTCGCTCACTT | |
| | | | CAATCATCTTGCTACTGTACTTCGTGCTCCGGAAAA | |
| | | | CCCGGGACCCCCCGGGGGACATCGACCTTCTCCGC | |
| | | | TCCGGGTCCTACCCGCTCTCCCGGCTGCTCCCGAG | |
| | | | GCGCCCGGTGATCGAGCGCCATGGCCTATGGGTTG | |
| | | | TGGAGGAGACGGCGAAGGAGGTGGAAGAGGTGGA | |
| | | | GACGCAGACGGTGGAGACGCCGCTGGAGGACCCG | |
| | | | CCGACGCAGACCTGCTGGACGCCGTAGACGCCGCA | |
| | | | GAACAGTAA | |
| AF116842.1 | AAD29635.1 | ORF2 | ATGGCTGAGTTTTCCACGCCCGTCCGCAGCGGTGA | 587 |
| | | | AGCCACGGAGGGAGATTACCGCGTCCCGAGGGCG | |
| | | | GGTGCCGAAGGTGAGTTTACACACCGAAGTCAAGG | |
| | | | GGCAATTCGGGCTCGGGACTGGCCGGGCTATGGGC | |
| | | | AAGGCTCTGAAAAAAGCATGTTTATTGGCAGGCATT | |
| | | | ACAGAAAGAAAAGGGCGCTGTCACTGTGTGCTGTG | |
| | | | CGAACAACAAAGAAGGCTTGCAAACTACTAATAGTA | |
| | | | ATGTGGACCCCACCTCGCAATGATCAACAGTACCTT | |
| | | | AACTGGCAATGGTACTCAAGTGTACTTAACCCCCAC | |
| | | | GCTGCTATGTTCGGGTGTCCCGACGCTGTCGCTCAT | |
| | | | TTTAATCATCTTGCTTCTGTGCTTCGTGCCCCGCAAA | |
| | | | ACCCACCCCCTCCCGGTCCCCAGCGAAACCTGCCC | |
| | | | CTCCGACGGGTGCCGGCTCTCCCGGCTGCGCCAGA | |
| | | | GGCGCCCGGAGATAGAGCACCATGGCCTATGGCTT | |
| | | | GTGGCACCGAAGGAGAAGACGGTGGCGCAGGTGG | |
| | | | AAACGCACACCATGGAAGCGCCGCTGGAGGACCCG | |
| | | | AAGACGCAGACCTGCTAGACGCCGTGGCCGCCGCA | |
| | | | GAAACGTAA | |
| AB026345.1 | BAA85661.1 | ORF2 | ATGTTTATTGGCAGGCATTACAGAAAGAAAAGGGCG | 588 |
| | | | CTGTCACTGTGTGCTGTGCGAACAACAAAGAAGGCT | |
| | | | TGCAAACTACTAATAGTAATGTGGACCCCACCTCGC | |
| | | | AATGATCAACAGTACCTTAACTGGCAATGGTACTCAA | |
| | | | GTGTACTTAGCTCCCACGCTGCTATGTGCGGGTGTC | |
| | | | CCGACGCTGTCGCTCATTTTAATCATCTTGCTTCTGT | |
| | | | GCTTCGTGCCCCGCAAAACCCACCCCCTCCCGGTC | |
| | | | CCCAGCGAAACCTGCCCCTCCGACGGCTGCCGGCT | |
| | | | CTCCCGGCTGCGCCAGAGGCGCCCGGAGATAGAG | |
| | | | CACCATGGCCTATGGCTGGTGGCGCCGAAGGAGAA | |
| | | | GACGGTGGCGCAGGTGGAGACGCAGACCATGGAG | |
| | | | GCGCCGCTGGAGGACCCGAAGACGCAGACCTGCTA | |
| | | | GACGCCGTGGCCGCCGCAGAAACGTAA | |
| AB026346.1 | BAA85663.1 | ORF2 | ATGTTTATTGGCAGGCATTACAGAAAGAAAAGGGCG | 589 |
| | | | CTGTCACTGTGTGCTGTGCGAACAACAAAGAAGGCT | |
| | | | TGCAAACTACTAATACTAATGTGGACCCCACCTCGC | |
| | | | AATGACCAACAGTACCTTAACTGGCAATGGTACTCA | |
| | | | AGTATACTTAGCTCCCACGCTGCTATGTGCGGGTGT | |
| | | | CCCGACGCTGTCGCTCATTTTAATCATCTTGCGTCT | |
| | | | GTGCTTCGTGCCCCGCAAAACCCACCCCCTCCCGG | |
| | | | TCCCCAGCGAAACCTGCCCCTCCGACGGCTGCCGG | |
| | | | CTCTCCCGGCTGCGCCAGAGGCGCCCGGAGATAGA | |
| | | | GCACCATGGCCTATGGCTGGTGGCGCCGAAGGAGA | |
| | | | AGACGGTGGCGCAGGTGGAGACGCAGACCATGGA | |
| | | | GGCGCCGCTGGAGGACCCGAAGACGCAGACCTGCT | |
| | | | AGACGCCGTGGCCGCCGCAGAAACGTAA | |
| AB026347.1 | BAA85665.1 | ORF2 | ATGTTTATTGGCAGGCATTACAGAAAGAAAAGGGCG | 590 |
| | | | CTGTCACTGTGTGCTGTGCGAACAACAAAGAAGGCT | |
| | | | TGCAAACTACTAATACTAATGTGGACCCCACCTCGC | |
| | | | AATGACCAACAGTACCTTAACTGGCAATGGTACTCA | |
| | | | AGTATACTTAGCTCCCACGCTGCTATGTGCGGGTGT | |
| | | | CCCGACGCTGTCGCTCATTTTAATCATCTTGCTTCTG | |
| | | | TGCTTCGTGCCCCGCAAAACCCACCCCCTCCCGGT | |
| | | | CCCCAGCGAAACCTGCCCCTCCGACGGCTGCCGGC | |
| | | | TCTCCCGGCTGCGCCAGAGGCGCCCGGAGATAGAG | |
| | | | CGCCATGGCCTATGGCTGGTGGCGCCGAAGGAGAA | |
| | | | GACGGTGGCGCAGGTGGAGACGCAGACCATGGAG | |
| | | | GCGCCGCTGGAGGACCCGAAGACGCAGACCTGCTA | |
| | | | GACGCCGTGGCCGCCGCAGAAACGTAA | |
| AB038622.1 | BAA93585.1 | ORF2 | ATGCCGTGGAGACCGCCGGTACATAACGTTCCAGG | 591 |
| | | | TCGCGAAAATCAATGGTTTGCAGCGTTTTTTCACTCG | |
| | | | CATGCTTCTTTCTGCGGCTGTGGTGACCCTGTTGGG | |
| | | | CATATTAACAGCATTGCTCCTCGCTTTCCTAACGCC | |
| | | | GGTCCACCGAGACCACCTCCAGGGCTAGAGCAGCA | |
| | | | GAACCCCGAGGGCCCGACGGGTCCCGGAGGTCCC | |
| | | | CCCGCCATCTTGCCAGCTCTGCCGGCCCCGGCAGA | |
| | | | CCCTGAACCGCCGCCACGGCTTGGTGGTGGGGCAG | |
| | | | ATGGAGGCGCCGCTGGAGGCCTCGCTATCGCAGAC | |
| | | | GCACCTGGAGGGTACGAAGAAGACGACCTAGACGA | |
| | | | ACTTTTCGCCGCCGCCGCCGAGGACGATATGTGA | |
| AB038623.1 | BAA93588.1 | ORF2 | ATGCCGTGGAGACCGCCGGCACATAACGTTCCGGG | 592 |
| | | | TAGGGAAAATCAATGGTTCGCAGCTGTGTTTCACTC | |
| | | | GCATGCTTCTTGGTGCGGCTGTGGTGACGTTGTTGG | |
| | | | GCATCTTAATACCATTGCTACTCGCTTTCCTAACGCC | |
| | | | GGTCCCCCGAGACCACCTCCAGGGCTAGACCAGCA | |
| | | | GAACCCCGAGGGCCCGGCGGGTCCCGGAGGTCCC | |
| | | | CCCGCCATCTTGCCTGCTCTGCCGGCCCCGGCAGA | |
| | | | CCCTGAACCGCCGCCACGGCGTGGTGGTGGGGCA | |
| | | | GATGGAGGCGTCGATGGAGGCCTCGCTATCGCAAA | |
| | | | CGCACCTGGAGATTACGGAGACGACGACCTAGACG | |
| | | | AACTTTTCGCCGCCGCCGCCGAAGACAATATGTGA | |
| AB038624.1 | BAA93591.1 | ORF2 | ATGCCGTGGAAACCGCCGCGACATAACGTTCCGGG | 593 |
| | | | TAGGGAAAACCAATGGTTTGCAGCAGTGTTTCACTC | |
| | | | GCATGCTTCTTGGTGCGGCTGTGCTGACGTTGTTGG | |
| | | | CCATCTTAATAGCATTGCTACTCGCTTTCCTAACATC | |
| | | | GGTCCCCCGAGACCACCTCCAGGGCTAGACCAGCA | |
| | | | GAACCCCGAGGGCCCGGCGGGTCCCGGAGGTCCC | |
| | | | CCCGCCATCTTGCCTGCTCTGCCGGCCCCGGCAAA | |
| | | | CCCTGAACCGCCGCCACGGCGTGGTGGTGGGGCA | |
| | | | GATGGAGGCGCCGCTGGAGGCCTCGCTATCGCAGA | |
| | | | CGCACCTGGAGGGTACGCAGAAGACGACCTAGACG | |
| | | | AACTTTTCGCCGCCGCCGCCGAGGACGATATGTGA | |
| AF254410.1 | AAF71534.1 | ORF2 | ATGTTTCCTGGTAGGATCCACAGAAAGAAAAGGAAA | 594 |
| | | | GTGCTATTGTCCCCACTGCACCCTGCACCGAAAACT | |
| | | | CGCCGGGTTATGAGCTGGTCTCGTCCAATACACGAT | |
| | | | GCCCCAGCCATTGAGCGTAACTGGTGGGAATCCAC | |
| | | | AGCTCGATCCCACGCATGTTGCTGTGGCTGCGGTAA | |
| | | | TTTTGTTAATCATATTAATGTACTGGCTAATCGGTAT | |
| | | | GGCTTTACTGGCTCCGCGCACACGCCGGGTGGTCC | |
| | | | CCGGCCGAGGCCCCCGACAGTGAGCTCTGGTCCCA | |
| | | | GTACTTCCTACCGACACCCCGAGACCGGCTTTACCA | |
| | | | TGGCATGGGGATACTGGTGGAGAAGGCGCTTCTGC | |
| | | | GACCGAGGAGACGCTGGAAGAAGGTGGCGGCGCC | |
| | | | GCCGAGACTACAACCCAGAAGATCTCGACGCTCTGT | |
| | | | TCGACGCCCTCGACGAAGAGTAA | |
| AB050448.1 | BAB19927.1 | ORF2 | ATGAGCTTTGTAGAACCCTTACTAACCAGCACCCAC | 595 |
| | | | AGAGAGATAGCATACTACCATGGCTGTGTTCAGATG | |
| | | | CACAAAGCCTTCTGTGGGTGTGACAACTTTCTTACC | |
| | | | CACCTGCAACGCATAACAACATACATCTCTGCTAAC | |
| | | | CAACACACTCCACCCAGCACACCCTCAAACACCCTC | |
| | | | CGTAGAGCCCGGGCCCTGCCCGCGGCTCCGGAGC | |
| | | | CAGCTCCATGGCGTGGACCTGGTGGTGGCAGAGGA | |
| | | | GGCGCCGAAGGTGGCCGTGGAGAAGGAGAAGGTG | |
| | | | GAGAAGACTACGCACAAGAAGACCTAGACGCCTTGT | |
| | | | TCGACGCCGTCGCAAGAGATACAGAGTAA | |
| AY026465.1 | AAK01941.1 | ORF2 | ATGCACTTTTCTCGAATAAACAGAAAGAAAAAGAAAG | 596 |
| | | | TGCTACTGCTTTGCGTGCCAGCAGCTAAGAAAAAAC | |
| | | | CAACTGCTATGAGCTTCTGGAGACCTCCGGTGCACA | |
| | | | ATGTCACGGGGATCCAGCGCCTGTGGTACGAGTCC | |
| | | | TTTCACCGTGGCCATGCTGCTTTTTGTGGTTGTGGG | |
| | | | GATCCTATACTTCACATTACTACACTTGCTGAGACAT | |
| | | | ATGGCCATCCAACAGGCCCGAGACCTTCTGGGTCAT | |
| | | | CGGGAGTAGACCCCGGCCCCAATATCCGTCGAGCC | |
| | | | AGGCCTGCCCCGGCCGCTCCGGAGCCCTCACAGGT | |
| | | | TGATTCCAGACCGGCCCTGCCATGGCATGGGGATG | |
| | | | GTGGAAGCGACGGCGGCGCTGGTGGTTCCGGAAG | |
| | | | CGGTGGACCCGTGGCAGACTTCGCAGACGATGGCC | |
| | | | TAGACCAGCTCGTCGGCGCCCTAGACGACGAAGAG | |
| | | | TAA | |
| AY026466.1 | AAK01943.1 | ORF2 | ATGCACTTTTCTAGGATACAAAGAAAGAAAAGGCTAT | 597 |
| | | | TGCTACTGCAGACACTGCCAGCTTCAAAGAAAACTA | |
| | | | GGCAACTTCTGAGAGGTATGTGGAGCCCACCCACA | |
| | | | GACGATGAACGTGTCCGTGAGCGTAAATGGCTCCTC | |
| | | | TCAGTTTTTCAGTCTCACTGTGCTTTCTGTGGCTGCA | |
| | | | ATGATCCTATCGGTCACCTTTGTCGCTTGGCTACTCT | |
| | | | GTCTAACCGCCCGGAGAGCCCGGGGCCCTCCGGA | |
| | | | GGACCCCGTACTCCTCAGATCCGGCACCTACCCGC | |
| | | | TCTCCCGGCTGCTCCCCAAGAGCCCGGTGATCGAG | |
| | | | CACCATGGCCTATGGCTGGTGGGCCCGGAGACGGA | |
| | | | GACGCTGGCGCCGCTGGAAGCGCAGGCCCTGGAG | |
| | | | ACGCCGATGGAGGACCCGCAGACGCAGACCTCGTC | |
| | | | GCCGCTATAGACGCCGCAGACATGTAA | |
| AF345521.1 | AAK11697.1 | Orf2 | ATGCACTTTCGCAGAGTCTCAGCGAAAAGGAAACTG | 598 |
| | | | CTACTGCTTCCTCTGCACCCTGCATCGCAGACACCT | |
| | | | GCCATGAGCTTCAGGGCGCCCTCTCTTAATGCCGGT | |
| | | | CAACGAGAGCAGCTATGGTTCGAGTCCATCGTCCGA | |
| | | | TCCCATGACAGTTATTGCGGGTGTGGTGATACTGTC | |
| | | | GCTCATTTTAATAACATTGCTACTCGCTTTAACTATCT | |
| | | | GCCTGTTACCTCCTCGCCTCTGGATCCTTCCTCGGG | |
| | | | CCCGCCGCGAGGCCGTCCAGCGCTCCGCGCACTC | |
| | | | CCGGCTCTGCCAGCGGCACCCTCCACCCCCTCTAC | |
| | | | TAGCCGACCATGGCGTGGTGGGGCAGATGGAGAAG | |
| | | | GTGGCCGCGGCGCCGGTGGAGGAGATGGCGGCGC | |
| | | | CGCCGTAGAAGGAGACTACCAACAAGAAGAACTCG | |
| | | | ACGAGCTGTTCGCGGCCTTGGAAGACGACCAAGAA | |
| | | | AGACGGTAA | |
| AF345522.1 | AAK11699.1 | Orf2 | ATGTTTCTTGGCAGGGCCTGGAGAAAGAAAAGGCAA | 599 |
| | | | GTGCCACTGCCGACACTGCCAGTGGTGCCGCTTCC | |
| | | | ACAACCTTCACCTATGAGCAGCCAGTGGAGACCCCC | |
| | | | GGTTCACAATGTCCAGGGGCTGGAGCGCAATTGGT | |
| | | | GGGAGTGCTTCTTCCGTTCTCATGCTTGTTTTTGTG | |
| | | | GCTGTGGTGATGCTATTACTCATATTAATCATCTGGC | |
| | | | GACTCGTTTTGGACGTCCTCCTACTACCTCAACTCC | |
| | | | CCGAGGACCGCAGGCACCTCCAGTGACTCCGTACC | |
| | | | CGGCCCTGCCGGCCCCAGAGCCTAGCCCTGAGCCA | |
| | | | TGGCGTGGCGCCGGTGGCGATGGCGGCCGTGGTG | |
| | | | GAGACGCCGGAGGCGCCGCCGGTGGAGAAGGAGA | |
| | | | CGGAGGAGACCCAGACGACGCCGCCCTTATCGACG | |
| | | | CCGTCGACCTCGCAGAGTAA | |
| AF345525.1 | AAK11705.1 | Orf2 | ATGTTTCTTGGTAAAATTTACAGACAGAAAAGGAAAG | 600 |
| | | | TGCCACTGTACGGCCTGCCAGCTCCAAAGAAAAAAC | |
| | | | CACCTACTGCTATGAGCCACTGGAGCAGACCCGTC | |
| | | | CACCATGCAACGGGGATCGAGCACCTCTGGTACCA | |
| | | | GTCTGTTATTAACAGCCATTCTGCTAGCTGCGGTTG | |
| | | | TGGCGATCCTGTACGCCACTTTACTTATCTTGCTGA | |
| | | | GAGGTATGGCTTTGCCCCAACTTCCCGGGCCCCGC | |
| | | | CGGTAGCCCCAACGCCCACCATCCGTAGAGCCAGG | |
| | | | CCCGCGCCTGCCGCTCCGGAGCCCCGTGCCCTACC | |
| | | | ATGGCATGGGGATGGTGGAGACGAAGGCGCAAGTG | |
| | | | GTGGTGGAGACGCCGGTTCGCCCGAAGCAGACTTC | |
| | | | GCAGACGACGGATTAGACGCCCTCGTCGCCGCACT | |
| | | | CGACGAAGAACAGTAA | |
| AF345527.1 | AAK11709.1 | Orf2 | ATGTTTCTCGGCAGGCCTTACAGAAAGAAGAGGCAA | 601 |
| | | | GTGCCACTGCCTGGCGTGCACCATCCACCGCACCC | |
| | | | ACGGCCTAGCATGAGCCACCACTGGCGGGAGCCCA | |
| | | | TCGACAATGTCCCCAACCGGGAGAGGCACTGGCTC | |
| | | | GGGTCCGTCCTCCGAGGCCACCGAGCTTTTTGTGG | |
| | | | TTGTCGGGATCCTGTGCTTCATTTTACTAATCTGGTT | |
| | | | GCACGTTACAATCTTCAGGGCGGTGGTCCCTCAGC | |
| | | | GGGTAGTCTTAGGGATCCGCCGCCACTGAGGAGGG | |
| | | | CGCTGCCGCCACCGCCGTCCCCCCGACCGCCATGT | |
| | | | CCTGGTGGGGATGGCGCCGCCGATGGTGGTGGAA | |
| | | | GCCACGGAGGCGATGGAGACGCAGGAGGGCGCGC | |
| | | | CGCCCGAGACGACTACCGCGACGACGATATAGAAG | |
| | | | ACCTACTCGCCGCTATCGAGGCAGACGAGTAA | |
| AF345528.1 | AAK11711.1 | Orf2 | ATGCGATTTTCTCGAATTTATCGCAGAAAGAAGAGG | 602 |
| | | | CTACTGCCACTGCTACTGGTGCCAACAGAACCGAAA | |
| | | | GAACAATTTGTGATGAGCTGGCGCTGTCCCTTAGAA | |
| | | | AATGCCTATAAGAGGGAAATTAACTTCCTCAGAGGG | |
| | | | TGCCAAATGCTTCACACTTGTTTTTGTGGTTGTGATG | |
| | | | ATTTTATTAATCATATTATTCGCCTACAAAATCTTCAC | |
| | | | GGGAATTTACACCAACCCACCGGCCCGTCCACACCT | |
| | | | CCAGTAGGCCGTAGAGCTCTGGCCCTGCCGGCAGC | |
| | | | TCCGGAACCATGGCGTGGAGATGGTGGTGGGCCCG | |
| | | | AAGGCGACCGAACCGCCGATGGACCCGCAGACGCT | |
| | | | GGAGGAGACTACGCACCCGGAGACCTAGACGACCT | |
| | | | GTTCGCCGCCGCCGCCGCCGACCAAGAGTAA | |
| AF345529.1 | AAK11713.1 | Orf2 | ATGGGCAACGCTCTTAGGGTATTCATTCTTAAAATGT | 603 |
| | | | TTATCGGCAGGGCCTACCGCCACAAGAAAAGGAAA | |
| | | | GTGCTACTGTCCGCACTGCGAGCTCCACAGGCGTC | |
| | | | TCGGAGGGCTATGAGTTGGAGACCCCCTGTACACG | |
| | | | ATGCGCCCGGCATCGAGCGCAATTGGTACGAGGCC | |
| | | | TGTTTCAGAGCCCACGCTGGAACTTGTGGCTGTGGC | |
| | | | AATTTTATTATGCACATTAATCTTCTGGCTGGGCGTT | |
| | | | ATGGTTTTACTCCGGTATCAGCACCACCAGGTGGTC | |
| | | | CTCCTCCGGGCACCCCGCAGATAAGGAGAGCCAGA | |
| | | | CCTAGTCCCGCCGCGCCCGAACAGCCCCAGGCCCT | |
| | | | ACCATGGCATGGGGATGGTGGAGACGGTGGCGCC | |
| | | | GGTGGCCCACCAGACGCTGGAGGAGACGCCGTCG | |
| | | | CCGGCGCCCCGTACGGAGAACAAGAGCTCGCCGAC | |
| | | | CTGCTCGACGCTATAGAAGACGACGAACAGTAA | |
| AF371370.1 | AAK54732.1 | ORF2 | ATGGCACACCCGGGCATGATGATGCTAAGCAAAATG | 604 |
| | | | AAAATACTAGTACCCAGTTCTGACACCAGACCGGGG | |
| | | | GGCAGACGCAGAGTAAAAGTTAAAATAAGACCCCCG | |
| | | | GCCCTTTTAGAAGACAAGTGGTACACTCAGCAAGAT | |
| | | | CTAGCGCCCGTTAATCTTGTGTCACTTGTGGTTTCT | |
| | | | GCGACTAGCTTCATACATCCGTTTAGCCAACCACAA | |
| | | | ACGAACAACATTTGCACAACTTTTCAGGTGTTGAAAG | |
| | | | ACATGTACTATGACTGCATAGGAGTTAGTTCCACTTT | |
| | | | AGACGACAAATATAAAAAATTATTTCAAAAATTATACA | |
| | | | CTAAATGCTGCTACTTTGAAACATTTCAAACAATAGC | |
| | | | CCAGCTAAACCCCGGCTTTAAATCTGCTAAAAAAACT | |
| | | | ACAACTGGCTCCGGTAAGGAAGCTGCCACACTAGG | |
| | | | CGACGCAGTTACACAATTAAAAAACCAACACGGTAG | |
| | | | TTTTTATACTGGAAACAATAGTACTTTTGGCTGCTGT | |
| | | | ACATATAACCCCACTGAAGAAATAGGTAAAGCAGCA | |
| | | | AATGAGTGGTTCTGGAACCAATTAACTGCAACAGAG | |
| | | | TCAGACACACTAGGACAGTACGGACGTGCCTCAATT | |
| | | | AAGTACTTTGAATATCACACAGGACTATACAGTTCCA | |
| | | | TATTTTTAAGTCCACTAAGGAGCAACCTAGAATTTTC | |
| | | | TACAGCATACCAGGATGTAACATACAATCCACTGAC | |
| | | | AGACCTAGGCATAGGCAACAGAATCTGGTACCAATA | |
| | | | CAGTACCAAGCCAGACACTACATTTAACGAAACACA | |
| | | | GTGCAAATGTGTACTAACTGACCTGCCCCTGTGGTC | |
| | | | CCTGTTTTATGGATACGTAGACTTTATAGAGTCAGAG | |
| | | | CTAGGCATAAGCGCAGAGATACACAACTTTGGCATA | |
| | | | GTTTGCGTTCAGTGCCCATACACCTTTCCACCCATG | |
| | | | TTCGACAAGTCTAAGCCAGACAAGGGCTACGTATTT | |
| | | | TATGACACCCTTTTTGGTAACGGAAAGATGCCAGAC | |
| | | | GGTTCCGGACACGTACCTACCTACTGGCAGCAGAG | |
| | | | ATGGTGGCCAAGATTTAGCTTCCAGAGACAAGTAAT | |
| | | | GCATGACATTATTCTGACTGGACCTTTTAGTTACAAA | |
| | | | GATGACTCTGTAATGACTGGACTAACAGCAGGCTAC | |
| | | | AAGTTTAAATTCACATGGGGCGGTGATATGATCTCC | |
| | | | GAACAGGTCATTAAAAACCCCGACAGAGGTGACGG | |
| | | | ACGCGAATCCTCCTATCCCGATAGACAGCGCCGCG | |
| | | | ACCTACAAGTTGTTGACCCTCGCTCCATGGGGCCCC | |
| | | | AATGGGTATTCCACACCTTTGACTACAGGAGGGGAC | |
| | | | TATTTGGAAAGGACGCTATTAAACGAGTGTCAGAAA | |
| | | | AACCGACAGATCCTGACTACTTTACAACACCTTACAA | |
| | | | AAAACCGAGGTTTTTCCCCCCAACAGCAGGAGAAGA | |
| | | | AAGACTGCAAGAAGAAAACTACACTTTACAGGAGAA | |
| | | | AAGAGACCCGTTCTCGTCAGAAGAGGGGCCGCAGA | |
| | | | GGACGCAAGTCCTCCAGCAGCAGGTCCTCCAGTCG | |
| | | | GAGCTCCAGCAGCAGCAGGAGCTCGGGGACCAGCT | |
| | | | CAGATTCCTCCTCAGGGAAATGTTCAAAACCCAAGC | |
| | | | GGGTATACACATGAACCCCCGCGCATTTCAAGAGCT | |
| | | | GTAA | |
| AB060596.1 | BAB69915.1 | ORF2 | ATGAGCTGGTGTACTCCAGTTGAAAATGCCTATAAG | 605 |
| | | | AGAGAGATCCACTTTCTCAGGGGCTGTCAACTGCTT | |
| | | | CACACTAGCTTTTGTGGTTGCGATGATTTTATTAATC | |
| | | | ATATTATTCGCCTACAAAATCTTCACGGCAACCTACA | |
| | | | CCAGCCCACGGGACCGTCCACACCTCCAGTGACCC | |
| | | | GTAGAGCTCTGGCCTTGCCGGCTGCTCCGGAGTCA | |
| | | | TGGCGTTCCGGTGGTGGTGGTGGAGACGCCGCCC | |
| | | | GCAGCGACGATGGACCCGGCGCCGATGGAGGAGA | |
| | | | CTACGAACCCGCCGACCTAGACGCACTGTACGACG | |
| | | | CCGTCGCCGCAGACCAAGAGTAA | |
| AB060592.1 | BAB69899.1 | ORF2 | ATGAGCTTTGTAGAACCGTTACTAAGCAGCACCCAC | 606 |
| | | | CGAGAGATAGCATTCTACCATGGCTGTGTTCAAATG | |
| | | | CACAAGGCCTTCTGTGGCTGTGACAACTTTCTTACC | |
| | | | CACCTGCAGCGCATAACAACATACATCTCTGCTAAT | |
| | | | CAACACACTCCACCCAGCACACCCTCAAACACCCTC | |
| | | | CGTAGAGCCCGGGCCCTGCCCGCGGCTCCGGAGC | |
| | | | CAGCTCCATGGCGTGGACCTGGTGGTGGCAGAGGA | |
| | | | GGCGCCGAAGGTGGCCGTGGAGAAGGAGAAGGTG | |
| | | | GAGAAGACTACGCACCAGAAGACCTAGACGACTTGT | |
| | | | TCGCCGCCGTCGCAAGAGATACAGAGTAA | |
| AB060593.1 | BAB69903.1 | ORF2 | ATGAGTCTGTGGCGACCCCCGGTCCACAATGCCCC | 607 |
| | | | CGGCAGAGAGAGACTTTGGTTTCAGGCCTGTTACGA | |
| | | | ATCTCACAGTGCTTTTTGTGGCTGTGGTAGCTTTATT | |
| | | | CTTCATCTTACTAGCTTGGCTGCACGTTTTAATTTTC | |
| | | | AGGCCGGGCCACCGCCTCCCGGGGGTCCCCGGGC | |
| | | | GGAGACCCCGCCGATTCTGAGGGCGCTGCCGGCAC | |
| | | | CCCAGCCGCGCCGCCACCGCCAGACGGAGAACCC | |
| | | | CGGGTCTGAGCCATGGCCTGGAGATGGTGGTGGAG | |
| | | | ACGGCGCTGGAAGCCAAGAAGGCGGCCAGCGTGG | |
| | | | ACCAAGTACCGCAGACGCAGGTGGAGACGACTTCG | |
| | | | ACCCCGCAGACCTAGAAGACTTGCTCGCGGCCGTC | |
| | | | GAAGAAGACGAACAGTAA | |
| AB060595.1 | BAB69911.1 | ORF2 | ATGAATCTCTGGCGACCCCCTCTGAGAAATATCCCC | 608 |
| | | | CACAGGGAGAGATGTTGGCTTGAGGCCTGTCTCAG | |
| | | | AGCCCACGATTCTTTTTGTGGCTGTCCTAGTCCTATT | |
| | | | GTTCATTTTTCTAGTCTGGTTGCACGTTTTAATCTAC | |
| | | | AAGGAGGCCCGCCGCCAGAGGATGACTCCCCACAG | |
| | | | GGCGCGCCAGTCCTGAGGGCCCTGCCGGCACCGA | |
| | | | GCCCCCACAGGCACACCCGCACGGAGAACCCCTCC | |
| | | | GGTGAGCCATGGCCTACTCCTACTGGTGGCGCCGC | |
| | | | CGGAGGTGGCCGTGGAGAGGCCGATGGAGGCGCT | |
| | | | GGAGGCGCCGCAGACGAATACCGCGCCGAAGACCT | |
| | | | AGACGACCTGTTCGCCGCTATCGAAGGAGACCAGT | |
| | | | AA | |
| AB064596.1 | BAB79313.1 | ORF2 | ATGCCGTGGAGACCGCCGGCTCATAACGTCCAGGG | 609 |
| | | | GCGAGAGAGCCAGTGGTTCGCGGCTTGTTTTCACG | |
| | | | GCCACGCTTCGTTTTGCGGCTGCGGTGACTTTATTG | |
| | | | GGCATATTAACAGCCTTGCTCCTCGCTTTCCTAACAA | |
| | | | CCAAGGACCCCCGCATCCACCTGCCTTAAACAGGC | |
| | | | CACCTGCACAGGGCCCAGAAAGCCCCGGGGGTTCC | |
| | | | ATACTACCCCTGCCAGCCCTACCGGCACCACCTGAT | |
| | | | CCGCCACCACGGCCTGGTGGTGGGGAAGACGGTG | |
| | | | GCGACGCCGCCCGTGGGGCCGCTGGCGCCGCCGA | |
| | | | AGGCGCGTATGGAGAAGAAGACCTAGAACTGCTGTT | |
| | | | CGCCGCCGCCGAGGAAGACGATATGTGA | |
| AB064597.1 | BAB79317.1 | ORF2 | ATGCCGTGGAGACCGCCGGTGCATAGTGTCCAGGG | 610 |
| | | | GCGAGAGGATCAGTGGTTCGCGAGCTTTTTTCACGG | |
| | | | CCACGCTTCATTTTGCGGTTGCGGTGACGCTGTTGG | |
| | | | CCATCTTAATAGCATTGCTCCTCGCTTTCCTCGCGC | |
| | | | CGGTCCACCAAGGCCCCCTCCGGGGCTAGAGCAGC | |
| | | | CTAACCCCCCGCAGCAGGGCCCGGCCGGGCCCGG | |
| | | | AGGGCCGCCCGCCATCTTGGCGCTGCCGGCTCCGC | |
| | | | CCGCGGAGCCTGACGACCCGCAGCCACGGCGTGG | |
| | | | TGGTGGGGACGGTGGCGCCGCCGCTGGCGCCGCA | |
| | | | GGCGACCGTGGAGACCGAGACTACGACGAAGAAGA | |
| | | | GCTAGACGAGCTTTTCCGCGCCGCCGCCGAAGACG | |
| | | | ATTTGTAA | |
| AB064599.1 | BAB79325.1 | ORF2 | ATGCCGTGGTCTCTGCCGAGACATAATATCAGAACG | 611 |
| | | | AGAGAAGATCTCTGGGTGCAATCGATTCTTTATTCAC | |
| | | | ATGACACTTTTTGTGGCTGTGATAATATTCCTGAGCA | |
| | | | TCTTACTGGCCTCCTGGGCGGCGTACGACCAGCTC | |
| | | | CACCTAGAAACCCAGGACCCCCTACCATACGGAGC | |
| | | | CTGCCGGCACTGCCGCCAGCTCCGGAACCCCCTGA | |
| | | | GGAACCACGGCGTGGTGGAGATACAGACGGAGACC | |
| | | | GTGGAGAAGATGGAGGAGACGCCGCTGGGGCCTAC | |
| | | | GAACCCGAAGACCTAGAAGAACTTTTCGCCGCCGC | |
| | | | CGAGCAAGACGATATGTGA | |
| AB064600.1 | BAB79329.1 | ORF2 | ATGTCGTGGAGACCGCCGAGCCAAAATTTACTGCAA | 612 |
| | | | AGAGAAGAGGCCTGGTACTCAGCTTTTCTTAGCTCG | |
| | | | CATTCTACATTTTGCGGTTGTACTGACCCTCTGCTGC | |
| | | | ATATTACTCTCATTGCTGGCCGCCTTACTAACCCCGT | |
| | | | ACCCGTCACCCGCCAACCGGAGACCCCTCCTAACG | |
| | | | GCCTCAGGGGGCTGCCGGCACTGCCAGCACCCCCT | |
| | | | GAACCACCAGCACCGCCACCACGGCCTGGGGATGG | |
| | | | TACCGGAGAAGAAGATGGCGCCCATGGAGAAGGAG | |
| | | | AAGGTGGGCGATACGCAGAAGAAGACCTAGAAGAA | |
| | | | CTGTTCGCCGCCGCGGCAGAAGACGATATGTGA | |
| AB064601.1 | BAB79333.1 | ORF2 | ATGTCGTGGGCTCCGCCGCTATTCAACTCGAAACAG | 613 |
| | | | AGAGAGGACCAGTGGTACCAGTCAATTATTTTCAGC | |
| | | | CATAATACTTTTTGCGGCTGCGGTGACCTTGTTAGG | |
| | | | CATTTTTGCGTCGTTGCTTCTCGCTTTACTGAGCCTC | |
| | | | CTGTAGTGCCGGCCCTACCGGCACCGGTACCGGCA | |
| | | | CCGCCACGGCGTGGTACAGAAGAAGAAGGTGGAGA | |
| | | | CCGTGGAGAAGACGCCGCAGACCGTGGACCCTACG | |
| | | | CAGAAGAAGAGCTAGAAGATTTGTTCGCCGCCGCC | |
| | | | CGAGAAGACGATATGTGA | |
| AB064602.1 | BAB79337.1 | ORF2 | ATGCCGTGGCATCCACCGGGCTACAACGTTCAACA | 614 |
| | | | GAGAGAAGAGCTCTGGGTACAGACAGTTACTACTTC | |
| | | | ACATGCTACTTTTTGCGGCTGTGGTGACCCTAGTAG | |
| | | | CCATCTTCACCGCATTCTTAGCCGCCTTAATAACAG | |
| | | | CAGCCGGCGGCCCCCCGAAACCCCAAACCCCATTC | |
| | | | GTGCCCTACCGGCCCTACCGGCACCCCAAGAACCT | |
| | | | GAACAGCCGCCATCACGGCCTGGTACCGGTACAGA | |
| | | | AGAAGGCCATGGCGCCGAAGGAGGCGACCGAGGT | |
| | | | GGGGCCTACGCAGAAGAAGATTTAGAAGATCTTTTC | |
| | | | GCGGCCGCGGAAGAAGACGATATGTGA | |
| AB064603.1 | BAB79341.1 | ORF2 | ATGTCGTGGCGACCGCCGTTGCATTCTATCCAAGGC | 615 |
| | | | AGAGAAGATCAATGGTATGCAGGCATCTTTCATACG | |
| | | | CATTTTGCTTTTTGCGGTTGTGGTGACCCTGTTGGG | |
| | | | CGTATTAACCGCATTGCTCACCGCTTTCCTAACGCC | |
| | | | GGTCCCCCGAGACCACCTCCAGGGCTAGACCAGCC | |
| | | | CAACCTCGGAGGGCCGGAAGGTCCAGGAGGTGCC | |
| | | | CCTAGAGCCCTGCCAGCCCTGCCGGCCCCGGCAGA | |
| | | | GCCAGAGCCGGCACCACGGCGTGGTGGTGGGGCC | |
| | | | GATGGAGACAGCGCCGCTGGGGCCGCCGCCGCCG | |
| | | | CAGACCATGGAGGGTACGACGAAGGAGACCTAGAA | |
| | | | GATCTTTTCGCCGCCGCCGCCGAGGACGATATGTGA | |
| AB064604.1 | BAB79345.1 | ORF2 | ATGAGTATTTGGAGGCCTCCACTGCACAATGTCCCG | 616 |
| | | | GGACTCGAACACCTCTGGTACGAGTCAGTGCATCGT | |
| | | | AGCCATGCTGCTGTTTGTGGCTGTGGGGATCCTGTA | |
| | | | CGCCATCTTACTGCTCTTGCTGAAAGATATGGCATT | |
| | | | CCGGGAGGGTCGCGGTCTTCTGGGGCACCGGGAG | |
| | | | TAGGGGGCAACCACAACCCTCCCCAGATCCGTCGA | |
| | | | GCCCGCCACCCGGCGGCTGCTCCGGACCCCCCAG | |
| | | | CAGGTAACCAGCCTCCGGCCCTGCCATGGCATGGG | |
| | | | GATGGTGGAAACGAAAGCGGCGCTGGTGGTGGAGA | |
| | | | AAGCGGTGGACCCGTGGCCGACTTCGCAGACGATG | |
| | | | GCCTAGACGATCTCGTCGCCGCCCTCGACGAAGAA | |
| | | | GAGTAA | |
| AB064606.1 | BAB79353.1 | ORF2 | ATGAGCTTCTGGAGACCTCCGGTGCACAATGCCAC | 617 |
| | | | GGGGATCCAGCGCCTGTGGTACGAGTCCTTTCACC | |
| | | | GTGGCCATGCTGCTTTTTGTGGTTGTGGGGATCCTA | |
| | | | TACTTCACATTACTGCACTTGCTGAGACATATGGCCA | |
| | | | TCCAACAGGCCCGAGACCTTCTGGGCCACCGCGAG | |
| | | | TAGACCCCGATCCCCAGATCCGTAGAGCCAGGCCT | |
| | | | GCCCCGGCCGCTCCGGAGCCCTCACAGGTTGAGCC | |
| | | | GAGACCTGCCCTGCCATGGCATGGGGATGGTGGAA | |
| | | | GCGACGGCGGCGCTGGTGGTTCCGGAAGCGGTGG | |
| | | | ACCCGTGGCAGACTTCGCAGACGATGGCCTCGATC | |
| | | | AGCTCGTCGCCGCCCTAGACGACGAAGAGTAA | |
| DQ003341.1 | AAX94181.1 | ORF2 | ATGGGCAAGGCTCTTAGAGTATTTATTCTTAATATGC | 618 |
| | | | GCTTTTCCAGAATTTACAAACAGAAGAAGAGGCCAC | |
| | | | TGCCACTGCTTCTGGTGCGAGTTGAACCGAAAGCAT | |
| | | | TCGCTAGTGATATGAGTTGGCGCCCTCCCGTTCACA | |
| | | | ATGCGGCAGGAATTGAGCGACAGCTCCTTGAGGGC | |
| | | | TGCTTTCGATTTCACGCTGCCTGTTGCGGTTGTGGC | |
| | | | AGTTTTATTACTCATCTTACTATACTGGCTGCTCGCT | |
| | | | ATGGTTTTACTGGGGGGCCGGCGCCGCCAGGTGGT | |
| | | | CCTGGGGCGCTGCCATCGCTGAGACGGGCTCAGCC | |
| | | | CGCGCCGGCGGCCCCCGAGAACCAGCCTGAACCA | |
| | | | GAGCTATGGCGTGGTCGTGGTGGTGGAGGCGACG | |
| | | | GAAACGCTGGTGGCCGCGCAGAAGGAGGCGATGG | |
| | | | AGGAGATTTCGCACCCGAAGAGCTAGACGAGCTGTT | |
| | | | CCGCGCCGTCGCCGCCGACGAAGAGTAA | |
| DQ003342.1 | AAX94184.1 | ORF2 | ATGGGCAAGGCTCTTAGAGTATTTATTCTTAATATGC | 619 |
| | | | GCTTTTCCAGAATTTACAAACAGAAGAAGAGGCCAC | |
| | | | TGCCACTGCTTCTGGTGCGAGTTGAACCGAAAGCAT | |
| | | | TCGCTAGTGATATGAGTTGGCGCCCTCCCGTTCACA | |
| | | | ATGCGGCAGGAATTGAGCGACAGCTCCTTGAGGGC | |
| | | | TGCTTTCGATTTCACGCTGCCTGTTGCGGTTGTGGC | |
| | | | AGTTTTATTACTCATCTTACTATACTGGCTGCTCGCT | |
| | | | ATGGTTTTACTGGGGGGCCGGCGCCGCCAGGTGGT | |
| | | | CCTGGGGCGCTGCCATCGCTGAGACGGGCTCAGCC | |
| | | | CGCGCCGGCGGCCCCCGAGAACCAGCCTGAACCA | |
| | | | GAGCTATGGCGTGGTCGTGGTGGTGGAGGCGACG | |
| | | | GAAACGCTGGTGGCCGCGCAGAAGGAGGCGATGG | |
| | | | AGGAGATTTCGCACCCGAAGAGCTAGACGAGCTGTT | |
| | | | CCGCGCCGTCGCCGCCGACGAAGAGTAA | |
| DQ003343.1 | AAX94187.1 | ORF2 | ATGGGCAAGGCTCTTAGAGTATTCATTCTTAATATGC | 620 |
| | | | GCTTTTCCAGAATTTACAAACAGAAGAAGAGGCCAC | |
| | | | TGCCACTGCTTCTGGTGCGAGTTGAACCGAAAGCAC | |
| | | | TCGCTAGTGATATGAGTTGGCGCCCTCCCGTTCACA | |
| | | | ATGCGGCAGGAATTGAGCGACAGCTCCTTGAGGGC | |
| | | | TGCTTTCGATTTCACGCTGCCTGTTGCGGTTGTGGC | |
| | | | AGTTTTATTACTCATCTTACTATACTGGCTGCTCGCT | |
| | | | ATGGTTATACTGGGGGGCCGGCGCCGCCAGGTGGT | |
| | | | CCTGGGGCGCTGCCATCGCTGAGACGGGCTCTGCC | |
| | | | CGCGCCGGCGGCCCCCGAGAACCAGCCTGAACCA | |
| | | | GAGCTATGGCGTGGTCGTGGTGGTGGAGGCGACG | |
| | | | GAAACGCTGGTGGCCGCGCAGAAGGAGGCGATGG | |
| | | | AGGAGATTTCGCACCCGAAGAGCTAGACGAGCTGTT | |
| | | | CCGCGCCGTCGCCGCCGACGAAGAGTAA | |
| DQ003344.1 | AAX94190.1 | ORF2 | ATGGGCAAGGCTCTTAGAGTATTCATTCTTAATATGC | 621 |
| | | | GCTTTTCCAGAATTTACAAACAGAAGAAGAGGCCAC | |
| | | | TGCCACTGCTTCTGGTGCGAGTTGAACCGAAAGCAC | |
| | | | TCGCTAGTGATATGAGTTGGCGCCCTCCCGTTCACA | |
| | | | ATGCGGCAGGAATTGAGCGACAGCTCCTTGAGGGC | |
| | | | TGCTTTCGATTTCACGCTGCCTGTTGCGGTTGTGGC | |
| | | | AGTTTTATTACTCATCTTACTATACTGGCTGCTCGCT | |
| | | | ATGGTTATACTGGGGGGCCGGCGCCGCCAGGTGGT | |
| | | | CCTGGGGCGCTGCCATCGCTGAGACGGGCTCTGCC | |
| | | | CGCGCCGGCGGCCCCCGAGAACCAGCCTGAACCA | |
| | | | GAGCTATGGCGTGGTCGTGGTGGTGGAGGCGACG | |
| | | | GAAACGCTGGTGGCCGCGCAGAAGGAGGCGATGG | |
| | | | AGGAGATTTCGCACCCGAAGAGCTAGACGAGCTGTT | |
| | | | CCGCGCCGTCGCCGCCGACGAAGAGTAA | |
| DQ186994.1 | ABD34285.1 | ORF2 | ATGGGCAAGGCTCTTAGAGTATTCATTCTTAATATGC | 622 |
| | | | GCTTTTCCAGAATTTACAAACAGAAGAAGAGGCCAC | |
| | | | TGCCACTGCTTCTGGTGCGAGTTGAACCGAAAGCAC | |
| | | | TCGCTAGTGATATGAGTTGGCGCCCTCCCGTTCACA | |
| | | | ATGCGGCAGGAATTGAGCGACAGCTCCTTGAGGGC | |
| | | | TGCTTTCGATTTCACGCTGCCTGTTGCGGTTGTGGC | |
| | | | AGTTTTATTACTCATCTTACTATACTGGCTACTCGCT | |
| | | | ATGGTTTTACTGGGGGGCCGGCGCCGCCAGGTGGT | |
| | | | CCTGGGGCGCTGCCATCGCTGAGACGGGCTCTGCC | |
| | | | CGCGCCGGCGGCCCCCGAGAACCAGCCTGAACCA | |
| | | | GAGCTATGGCGTGGTCGTGGTGGTGGAGGCGACG | |
| | | | GAAACGCTGGTGGCCGCGCAGAAGGAGGCGATGG | |
| | | | AGGAGATTTCGCACCCGAAGAGCTAGACGAGCTGTT | |
| | | | CCGCGCCGTCGCCGCCGACGAAGAGTAA | |
| DQ186995.1 | ABD34287.1 | ORF2 | ATGGGCAAGGCTCTTAGAGTATTCATTCTTAATATGC | 623 |
| | | | GCTTTTCCAGAATTTACAAACAGAAGAAGAGGCCAC | |
| | | | TGCCACTGCTTCTGGTGCGAGTTGAACCGAAAGCAC | |
| | | | TCGCTAGTGATATGAGTTGGCGCCCTCCCGTTCACA | |
| | | | ATGCGGCAGGAATTGAGCGACAGCTCCTTGAGGGC | |
| | | | TGCTTTCGATTTCACGCTGCCTGTTGCGGTTGTGGC | |
| | | | AGTTTTATTACTCATCTTACTATACTGGCTACTCGCT | |
| | | | ATGGTTTTACTGGGGGGCCGGCGCCGCCAGGTGGT | |
| | | | CCTGGGGCGCTGCCATCGCTGAGACGGGCTCTGCC | |
| | | | CGCGCCGGCGGCCCCCGAGAACCAGCCTGAACCA | |
| | | | GAGCTATGGCGTGGTCGTGGTGGTGGAGGCGACG | |
| | | | GAAACGCTGGTGGCCGCGCAGAAGGAGGCGATGG | |
| | | | AGGAGATTTCGCACCCGAAGAGCTAGACGAGCTGTT | |
| | | | CCGCGCCGTCGCCGCCGACGAAGAGTAA | |
| DQ186996.1 | ABD34289.1 | ORF2 | ATGGGCAAGGCTCTTAGGGTCTTCATTCTTAATATGT | 624 |
| | | | TCCTTGGCAGGGTTTACCGCCACAAGAAAAGGAAAG | |
| | | | TGCTACTGTCTACACTGCGAGCTCCACAGGCGTCTC | |
| | | | GCAGGGCTATGAGTCGGCGACCCCCGGTACACGAT | |
| | | | GCACCCGGCATCGAGCGCAATTGGTACGAGGCCTG | |
| | | | TTTCAGAGCCCACGCTGGAGCTTGTGGCTGTGGCA | |
| | | | ATTTTATTATGCACCTTAATCTTCTGGCTGGGCGTTA | |
| | | | TGGTTTTACTCCGGGGTCAGCGCCGCCAGGTGGTC | |
| | | | CTCCTCCGGGCACCCCGCAGATAAGAAGAGCCAGA | |
| | | | CCTAGTCCCGCCGCACCCCAAGAGCCCGCTGCTCT | |
| | | | ACCATGGCATGGGGATGGTGGAGATGGCGGCGCC | |
| | | | GCTGGCCCGCCAGACGCTGGAGGAGACGCCGTCG | |
| | | | CCGGCGCCCCGTACGGAGAACAAGAGCTCGCCGAC | |
| | | | CTGCTCGACGCTATAGAAGACGACGAACAGTAA | |
| DQ186997.1 | ABD34291.1 | ORF2 | ATGGGCAAGGCTCTTAGGGTCTTCATTCTTAATATGT | 625 |
| | | | TCCTTGGCAGGGTTTACCGCCACAAGAAAAGGAAAG | |
| | | | TGCTACTGTCCACACTGCGAGCTCCACAGGCGTCTC | |
| | | | GCAGGGCTATGAGTTGGCGACCCCCGGTACACGAT | |
| | | | GCACCCGGCATCGAGCGCAATTGGTACGAGGCCTG | |
| | | | TTTCAGAGCCCACGCTGGAGCTTGTGGCTGTGGCA | |
| | | | ATTTTATTATGCACCTTAATCTTCTGGCTGGGCGTTA | |
| | | | TGGTTTTACTCCGGGGTCAGCGCCGCCAGGTGGTC | |
| | | | CTCCTCCGGGCACCCCGCAGATAAGAAGAGCCAGA | |
| | | | CCTAGTCCCGCCGCACCCCAAGAGCCCGCTGCTCT | |
| | | | ACCATGGCATGGGGATGGTGGAGATGGCGGCGCC | |
| | | | GCTGGCCCGCCAGACGCTGGAGGAGACGCCGTCG | |
| | | | CCGGCGCCCCGTACGGAGAACAAGAGCTCGCCGAC | |
| | | | CTGCTCGACGCTATAGAAGACGACGAACAGTAA | |
| DQ186998.1 | ABD34293.1 | ORF2 | ATGGGCAAGGCTCTTAGGGTCTTCATTCTTAATATGT | 626 |
| | | | TCCTTGGCAGGGTTTACCGCCACAAGAAAAGGAAAG | |
| | | | TGCTACTGTCCACACTGCGAGCTCCACAGGCGTCTC | |
| | | | GCAGGGCTATGAGTTGGCGACCCCCGGTACACGAT | |
| | | | GCACCCGGCATCGAGCGCAATTGGTACGAGGCCTG | |
| | | | TTTCAGAGCCCACGCTGGGGCTTGTGGCTGTGGCA | |
| | | | ATTTTATTATGCACCTTAATCTTCTGGCTGGGCGTTA | |
| | | | TGGTTTTACTCCGGGGTCAGCGCCGCCAGGTGGTC | |
| | | | CTCCTCCGGGCACCCCGCAGATAAGAAGAGCCAGA | |
| | | | CCTAGTCCCGCCGCACCCCAAGAGCCCGCTGCTCT | |
| | | | ACCATGGCATGGGGATGGTGGAGATGGCGGCGCC | |
| | | | GCTGGCCCGCCAGACGCTGGAGGAGACGCCGTCG | |
| | | | CCGGCGCCCCGTACGGAGAACAAGAGCTCGCCGAC | |
| | | | CTGCTCGACGCTATAGAAGACGACGAACAGTAA | |
| DQ186999.1 | ABD34295.1 | ORF2 | ATGCACTTTTCTCGAATAAGCAGAAAGAAAAGGAAA | 627 |
| | | | GTGCTACTGCTTTGCGTGCCAGCAGCTAAGAAAAAA | |
| | | | CCAACTGCTATGAGCTTCTGGAGACCTCCGGTGCAC | |
| | | | AATGTCACGGGGATCCAGCGCCTGTGGTACGAGTC | |
| | | | CTTTCACCGTGGCCATGCTGCTTTTTGTGGTTGTGG | |
| | | | GGATCCTATACTTCACATTACTTCACTTGCTGAGACA | |
| | | | TATGGCCATCCAACAGGCCCGAGACCTTCTGGGTCA | |
| | | | TCGGGAATAGACCCCACTCCGCCCATCCGTAGAGC | |
| | | | CAGGCCTGCCCCGGCCGCTCCGGAACCCTCACAGG | |
| | | | TTGACTCCAGACCGGCCCTGCCATGGCATGGAGAT | |
| | | | GGTGGAAGCGACGGAGGCGCTGGTGGTTCCGCAA | |
| | | | GCGGTGGACCCGTGGCAGACTTCGCAGACGATGGC | |
| | | | CTCGACCAGCTCGTCGCCGACCTAGACGACGAAGA | |
| | | | GTAA | |
| DQ187000.1 | ABD34297.1 | ORF2 | ATGCACTTTTCTCGAATAAGCAGAAAGAAAAGGAAA | 628 |
| | | | GTGCTACTGCTTTGCGTGCCAGCAGCTAAGAAAAAA | |
| | | | CCAACTGCTATGAGCTTCTGGAGACCTCCGGTGCAC | |
| | | | AATGTCACGGGGATCCAGCGCCTGTGGTACGAGTC | |
| | | | CTTTCACCGTGGCCATGCTGCTTTTTGTGGTTGTGG | |
| | | | GGATCCTATACTTCACATTACTTCACTTGCTGAGACA | |
| | | | TATGGCCATCCAACAGGCCCGAGACCTTCTGGGTCA | |
| | | | TCGGGAATAGACCCCACTCCGCCCATCCGTAGAGC | |
| | | | CAGGCCTGCCCCGGCCGCTCCGGAACCCTCACAGG | |
| | | | TTGACTCCAGACCGGCCCTGCCATGGCATGGAGAT | |
| | | | GGTGGAAGCGACGGAGGCGCTGGTGGTTCCGCAA | |
| | | | GCGGTGGACCCGTGGCAGACTTCGCAGACGATGGC | |
| | | | CTCGACCAGCTCGTCGCCGACCTAGACGACGAAGA | |
| | | | GTAA | |
| DQ187001.1 | ABD34299.1 | ORF2 | ATGCACTTTTCTCGAATAAGCAGAAAGAAAAGGAAA | 629 |
| | | | GTGCTACTGCTTTGCGTGCCAGCAGCTAAGAAAAAA | |
| | | | CCAACTGCTATGAGCTTCTGGAGACCTCCGGTGCAC | |
| | | | AATGTCACGGGGATCCAGCGCCTGTGGTACGAGTC | |
| | | | CTTTCACCGTGGCCATGCTGCTTTTTGTGGTTGTGG | |
| | | | GGATCCTATACTTCACATTACTTCACTTGCTGAGACA | |
| | | | TATGGCCATCCAACAGGCCCGAGACCTTCTGGGTCA | |
| | | | TCGGGAATAGACCCCACTCCGCCCATCCGTAGAGC | |
| | | | CAGGCCTGCCCCGGCCGCTCTGGAACCCTCACAGG | |
| | | | TTGACTCCAGACCGGCCCTGCCATGGCACGGAGAT | |
| | | | GGTGGAAGCGACGGAGGCGCTGGTGGTTCCGCAA | |
| | | | GCGGTGGACCCGTGGCAGACTTCGCAGACGATGGC | |
| | | | CTCGACCAGCTCGTCGCCGACCTAAACGACGAAGA | |
| | | | GTAA | |
| DQ187002.1 | ABD34301.1 | ORF2 | ATGCACTTTTCTCGAATAAGCAGAAAGAAAAGGAAA | 630 |
| | | | GTGCTACTGCTTTGCGTGCCAGCAGCTAAGAAAAAA | |
| | | | CCAACTGCTATGAGCTTCTGGAGACCTCCGGTGCAC | |
| | | | AATGTCACGGGGATCCAGCGCCTGTGGTACGAGTC | |
| | | | CTTTCACCGTGGCCATGCTGCTTTTTGTGGTTGTGG | |
| | | | GGATCCTATACTTCACATTACTTCACTTGCTGAGACA | |
| | | | TATGGCCATCCAACAGGCCCGAGACCTTCTGGGTCA | |
| | | | TCGGGAATAGACCCCACTCCGCCCATCCGTAGAGC | |
| | | | CAGGCCTGCCCCGGCCGCTCCGGAACCCTCACAGG | |
| | | | TTGACTCCAGACCGGCCCTGCCATGGCATGGAGAT | |
| | | | GGTGGAAGCGACGGAGGCGCTGGTGGTTCCGCAA | |
| | | | GCGGTGGACCCGTGGCAGACTTCGCAGACGATGGC | |
| | | | CTCGACCAGCTCGTCGCCGACCTAAACGACGAAGA | |
| | | | GTAA | |
| DQ187003.1 | ABD34303.1 | ORF2 | ATGCACTTTTCTCGAATAAGCAGAAAGAAAAGGAAA | 631 |
| | | | GTGCTACTGCTTTGCGTGCCAGCAGCTAAGAAAAAA | |
| | | | CCAACTGCTATGAGCTTCTGGAGACCTCCGGTGCAC | |
| | | | AATGTCACGGGGATCCAGCGCCTGTGGTACGAGTC | |
| | | | CTTTCACCGTGGCCATGCTGCTTTTTGTGGTTGTGG | |
| | | | GGATCCTATACTTCACATTACTTCACTTGCTGAGACA | |
| | | | TATGGCCATCCAACAGGCCCGAGACCTTCTGGGTCA | |
| | | | TCGGGAATAGACCCCACTCCGCCCATCCGTAGAGC | |
| | | | CAGGCCTGCCCCGGCCGCTCCGGAACCCTCACAGG | |
| | | | TTGACTCCAGACCGGCCCTGCCATGGCATGGAGAT | |
| | | | GGTGGAAGCGACGGAGGCGCTGGTGGTTCCGCAA | |
| | | | GCGGTGGACCCGTGGCAGACTTCGCAGACGATGGC | |
| | | | CTCGACCAGCTCGTCGCCGACCTAGACGACGAAGA | |
| | | | GTAA | |
| DQ187004.1 | ABD34304.1 | ORF2 | ATGTTTTTCGGTAGACATTGGCGAAAGAAAAGGGCA | 632 |
| | | | CTGTTACTGTCTAGCTTGCGAACTTCAAAGAAGAAA | |
| | | | CCACCTGCAATGAGCCAGTGGTGCCCGCCTGTGCA | |
| | | | CAGCGTTCAGGGTCGCAACCACCAGTGGTATGAAG | |
| | | | CCTGCTACCGTGGCCATGCTGCTTATTGTGGCTGTG | |
| | | | GCGATTTTATTAGTCACCTTGTTGCTCTGGGTAATCA | |
| | | | GTTTGGCTTCAGGCCGGGTCCCCGAGCTCCTGGCG | |
| | | | CACCGGGGCTAGGGGGACCCCCCGTTCTGCCCCGT | |
| | | | AGAGCCCTGCCGGCACCCCCGGCTGAGGCTCCGG | |
| | | | AGCACCAGCAGGGCAACAACAACAACAACCAGCAG | |
| | | | CTGCAGAGATGGCCTGGGGATGGTGGAAACGCAGA | |
| | | | CGGCGCCGATGGTGGAGAGGCCTCTGGAGGAGAC | |
| | | | GCCGCTTTGCCAGAAGACGACCTAGACGGCCTGCT | |
| | | | CGCCGCCCTAGACGACGAAGAGTAA | |
| DQ187005.1 | ABD34306.1 | ORF2 | ATGTTTTTCGGTAGGCATTGGCGAAAGAAAAGGGCA | 633 |
| | | | CTGTTACTGTCTAGCTTGCGAACTTCAAAGAAGAAA | |
| | | | CCACCTGCAATGAGCCAGTGGTGCCCGCCTGTGCA | |
| | | | CAGCGTTCAGGGTCGCAACCACCAGTGGTATGAAG | |
| | | | CCTGCTACCGTGGCCATGCTGCTTATTGTGGCTGTG | |
| | | | GCGATTTTATTAGTCACCTTGTTGCTCTGGGTAATCA | |
| | | | GTTTGGCTTCGGGCCGGGTCCCCGAGCTCCTGGCG | |
| | | | CACCGGGGCTAGGGGGACCCCCCGTTCTGCCCCGT | |
| | | | AGAGCCCTGCCGGCACCCCCGGCTGAGGCTCCGG | |
| | | | AGCACCAGCAGGGCAACAACAACAACAACCAGCAG | |
| | | | CTGCAGAGACGGCCTGGGGATGGTGGAAACGCAGA | |
| | | | CGGCGCCGATGGTGGAGAGGCCTCTGGAGGAGAC | |
| | | | GCCGCTTTGCCAGAAGACGACCTAGACGGCCTGCT | |
| | | | CGCCGCCCTAGACGACGAAGAGTAA | |
| DQ187007.1 | ABD34309.1 | ORF2 | ATGTTTTTCGGTAGGCATTGGCGAAAGAAAAGGGCA | 634 |
| | | | CTGTTACTGTCTAGCTTGCGAACTTCAAAGAAGAAA | |
| | | | CCACCTGCAATGAGCCAGTGGTGCCCGCCTGTGCA | |
| | | | CAGCGTTCAGGGTCGCAACCACCAGTGGTATGAAG | |
| | | | CCTGCTACCGTGGCCATGCTGCTTATTGTGGCTGTG | |
| | | | GCGATTTTATTAGTCACCTTGTTGCTCTGGGTAATCA | |
| | | | GTTTGGCTTCAGGCCGGGTCCCCGAGCTCCTGGCG | |
| | | | CACCGGGGCTAGGGGGACCCCCCGTTCTGCCCCGT | |
| | | | AGAGCCCTGCCGGCACCCCCGGCTGAGGCTCCGG | |
| | | | AGCACCAGCAGGGCAACAACAACAACAACCAGCAG | |
| | | | CTGCAGAGATGGCCTGGGGATGGTGGAAACGCAGA | |
| | | | CGGCGCCGATGGTGGAGAGGCCTCTGGAGGAGAC | |
| | | | GCCGCTTTGCCAGAAGACGACCTAGACGGCCTGCT | |
| | | | CGCCGCCCTAGACGACGAAGAGTAA | |
| EF538879.1 | ABU55886.1 | ORF2 | ATGCACTTTTCTCGAATAAGCAGAAAGAAAAGGAAA | 635 |
| | | | GTGCTACTGCTTTGCGTGCCAGCAGCTAAGAAACAA | |
| | | | CCAACTGCTATGAGCTTCTGGAGACCTCCGATACAC | |
| | | | AATGTCACGGGGATCCAGCGCCTGTGGTACGAGTC | |
| | | | CTTTCACCGTGGCCATGCTGCTTTTTGTGGTTGTGG | |
| | | | GGATCCTATACTTCACATTACTGCACTTGCTGAGACA | |
| | | | TATGGCCATCCAACAGGCCCGAGACCTTCTGGGTCA | |
| | | | TCGGGAATAGACCCCACTCCCCCAATCCGTAGAGC | |
| | | | CAGGCCCGCCCCGGCCGCTCCGGAGCCCTCACAG | |
| | | | GCTGAGTCCAGACCGGCCCTGCCATGGCATGGAGA | |
| | | | TGGTGGAAGCGACGGAGGCGCTGGTGGTTCCGCAA | |
| | | | GCGGTGGACCCGTGGCAGACTTCGCAGACGATGGC | |
| | | | CTCGACCAGCTCGTCGCCGCCCTAGACGACGAAGA | |
| | | | GTAA | |
| FJ426280.1 | ACK44072.1 | ORF2 | ATGTTTCTCGGCAGGGTGTGGAGGAAACAGAAAAG | 636 |
| | | | GAAAGTGCTTCTGCTGGCTGTGCGAGCTACACAGAA | |
| | | | AACATCTTCCATGAGTATCTGGCGTCCCCCTCTCGG | |
| | | | GAATGTCTCCTACAGGGAGAGAAATTGGCTTCAGGC | |
| | | | CGTCGAAGGATCCCACAGTTCCTTTTGTGGCTGTGG | |
| | | | TGATTTTATTCTTCATCTTACTAATTTGGCTGCACGC | |
| | | | TTTGCTCTTCAGGGGCCCCCGCCGGAGGGTGGTCC | |
| | | | TCCTCGGCCGAGGCCGCCGCTCCTGAGAGCGCTGC | |
| | | | CGGCCCCCGAGGTCCGCAGGGAAACGCGCACAGA | |
| | | | GAACCCGGGCGCCTCCGGTGAGCCATGGCCTGGC | |
| | | | GATGGTGGTGGCAGAGACGATGGCGCCGCCGCCC | |
| | | | GTGGCCCCGCAGACGGTGGAGACGCCTACGACGC | |
| | | | CGGAGACCTCGACGACCTGTTCGCCGCCGTCGAAG | |
| | | | ACGAGCAACAGTAA | |
| FJ392105.1 | ACR20258.1 | ORF2 | CTGCCACTGCTACCTGTGCCAGCTACACCGCAAGAA | 637 |
| | | | CGGCCTAGTCGTGCGCCCCTGATGGCCTGCGGACC | |
| | | | CAGAGGATGGATGCCCCCCAACTTCGGGGGACACG | |
| | | | ACAGAGAAAATGCTTGGTGCAAATCTGTTAAATTGTC | |
| | | | TCATGATGCTTTCTGTGGCTGCGACGATCCTCTTAC | |
| | | | CCATCTTGCTGCTCTGCTACCAAGCAGACAAGCTTC | |
| | | | TCGTCAGAATACTCCTTCTGCTCCACCTCCGCGCCC | |
| | | | CCCGCCGCCGACCCCGAGGCAGGGCCAGGGCTCT | |
| | | | GGGCCGCCTCAGGGGCGAATCAGACCGTCCTGGTC | |
| | | | CCTCCCGGTGACCCCACCCGCTGACGAGCCATGGC | |
| | | | AGCCTGGTGGTGGGGCAGGCGGAGACGCTGGCGC | |
| | | | AGGTGGAGGCGCCGCCGCCTCCCTCGCCGCCGCC | |
| | | | GCTGGCGACGGAGGAGACGGTGGCCCAGAAGACG | |
| | | | CAGGCGGAGATGGCCGCGCAGACGCAGACGTCGC | |
| | | | AGACCTGCTCGCCGCCCTAGAAGGAGACGCAGACG | |
| | | | CCGAAGGGTAA | |
| FJ392107.1 | ACR20261.1 | ORF2 | GATCCTCTTACCCATCTTGCTGCTCTGCTACCAGGC | 638 |
| | | | AGACAAGCTTCTCGTCAGAATACTCCTTCTGCTCCA | |
| | | | CCTCCGCGCCCCCCGCCGCCGACCCCGAGGCAGG | |
| | | | GCCAGGGCTCTGGGCCGCCTCAGGGGCGAATCAGA | |
| | | | CCGTCCTGGTCCCTCCCGGTGACCCCACCCGCTGA | |
| | | | CGAGCCATGGCAGCCTGGTGGTGGGGCAGGCGGA | |
| | | | GACGCTGGCGCAGGTGGAGGCGCCGCCGCCTCCC | |
| | | | TCGCCGCCGCCGCTGGCGACGGAGGAGACGGTGG | |
| | | | CCCAGAAGACGCAGGCGGAGATGGCCGCGCAGAC | |
| | | | GCAGACGTCGCAGACCTGCTCGCCGCCCTAGAAGG | |
| | | | AGACGCAGACGCCGAAGGGTAA | |
| FJ392108.1 | ACR20263.1 | ORF2 | TCTCATGATGCTTTCTGTGGCTGCGACGATCCTCTT | 639 |
| | | | ACCCATCTTGCTGCTCTGCTACCAGGCAGACAAGCT | |
| | | | TCTCGTCAGAATACTCCTTCTGCTCCACCTCCGCGC | |
| | | | CCCCCGCCGCCGACCCCGAGGCAGGGCCAGGGCT | |
| | | | CTGGGCCGCCTCAGGGGCGAATCAGACCGTCCTGG | |
| | | | TCCCTCCCGGTGACCCCACCCGCTGACGAGCCATG | |
| | | | GCAGCCTGGTGGTGGGGCAGGCGGAGACGCTGGC | |
| | | | GCAGGTGGAGGCGCCGCCGCCTCCCTCGCCGCCG | |
| | | | CCGCTGGCGACGGAGGAGACGGTGGCCCAGAAGA | |
| | | | CGCAGGCGGAGATGGCCGCGCAGACGCAGACGTC | |
| | | | GCAGACCTGCTCGCCGCCCTAGAAGGAGACGCAGA | |
| | | | CGCCGAAGGGTAA | |
| FJ392111.1 | ACR20268.1 | ORF2 | CAAGAACGGCCTAGTCGTGCGCCCCTGATGGCCTG | 640 |
| | | | CGGACCCAGAGGATGGATGCCCCCCAACTTCGGGG | |
| | | | GACACGACAGAGAAAATGCTTGGTGCAAATCTGTTA | |
| | | | AATTGTCTCATGATGCTTTCTGTGGCTGCGACGATC | |
| | | | CTCTTACCCATCTTGCTGCTCTGCTACCAGGCAGAC | |
| | | | AAGCTTCTCGCCAGAATACTCCTTCTGCTCCACCTC | |
| | | | CGCGCCCCCCGCCGCCGACCCCGAGGCAGGGCCA | |
| | | | GGGCTCTGGGCCGCCTCAGGGGCGAATCAGACCGT | |
| | | | CCTGGTCCCTCCCGGTGACCCCACCCGCTGACGAG | |
| | | | CCATGGCAGCCTGGTGGTGGGGCAGGCGGAGACG | |
| | | | CTGGCGCAGGTGGAGGCGCCGCCGCCTCCCTCGC | |
| | | | CGCCGCCGCTGGCGACGGAGGAGACGGTGGCCCA | |
| | | | GAAGACGCAGGCGGAGATGGCCGCGCAGACGCAG | |
| | | | ACGTCGCAGACCTGCTCGCCGCCCTAGAAGGAGAC | |
| | | | GCAGACGCCGAAGGGTAA | |
| FJ392112.1 | ACR20270.1 | ORF2 | CTGCTACCTGTGCCAGCTACACCGCAAGAACGGCC | 641 |
| | | | TAGTCGTGCGCCCCTGATGGCCTGCGGACCCAGAG | |
| | | | GATGGATGCCCCCCAACTTCGGGGGACACGACAGA | |
| | | | GAAAATGCTTGGTGCAAATCTGTTAAATTGTCTCATG | |
| | | | ATGCTTTCTGTGGCTGCGACGATCCTCTTACCCATC | |
| | | | TTGCTGCTCTGCTACCAGGCAGACAAGCTTCTCGTC | |
| | | | AGAATACTCCTTCTGCTCCACCTCCGCGCCCCCCGC | |
| | | | CGCCGACCCCGAGGCAGGGCCAGGGCTCTGGGCC | |
| | | | GCCTCAGGGGCGAATCAGACCGTCCTGGTCCCTCC | |
| | | | CGGTGACCCCACCCGCTGACGAGCCATGGCAGCCT | |
| | | | GGTGGTGGGGCAGGCGGAGACGCTGGCGCAGGTG | |
| | | | GAGGCGCCGCCGCCTCCCTCGCCGCCGCCGCTGG | |
| | | | CGACGGAGGAGACGGTGGCCCAGAAGACGCAGGC | |
| | | | GGAGATGGCCGCGCAGACGCAGACGTCGCAGACCT | |
| | | | GCTCGCCGCCCTAGAAGGAGACGCAGACGCCGAAG | |
| | | | GGTAA | |
| FJ392113.1 | ACR20271.1 | ORF2 | ATGTTCCTCGGCAGGCCGTGGAGAAAGAGGAGGGC | 642 |
| | | | GGCCGGGAAGAAAGGGCCACTGCCACTGCAAGCTG | |
| | | | TGCGAGCTGCATCGCAGGAACGGTCTGACAGTGCA | |
| | | | CCGCTGATGGCCTGCGGACCCCGGGGATGGATGCC | |
| | | | CCCGAACTTCGGGGGACACGAGAGAGAAAATGCCT | |
| | | | GGAGCCAGTCTGTTGTACTGTCTCATGATGCTTTCT | |
| | | | GTGGCTGCGACGATCCTGCTACCCATCTTACTGCTC | |
| | | | TGCTATCAGGTAGACAAGCTTCTCGTCAGAGTACTC | |
| | | | CTTCTGCTCCACCTCCGCGCCCCCCGCCGCCGTCC | |
| | | | CCGAGGCAGGGCCAGGGGTCTCGGTCACCTCCGG | |
| | | | GGCGAATCAGACCATCCTGGTCCCTCCCGGTAGCC | |
| | | | CCGCCGAGTGAAGGGCCATGGCTGCCTGGTGGTGG | |
| | | | GGCAGGAGGCGGCGATGGCGCCGGTGGAGACGGC | |
| | | | GCCGTCTCCCTCGCCGCCGCCGCTGGTGACGGAG | |
| | | | GAGACGGTGGCCCAGGAGGCGTAGGCGGAGATGG | |
| | | | CCGCGGAGACGCAGACGTCGCAGACCTGCTCGCCG | |
| | | | CCTTAGAAGGAGACGTCGACGCAGAAGGGTAA | |
| FJ392114.1 | ACR20273.1 | ORF2 | ATGTTCCTCGGCAGGCCGTGGAGAAAGAGGAGGGC | 643 |
| | | | GGCCGGGAAGAAAGGGCCACTGCCACTGCAAGCTG | |
| | | | TGCGAGCTGCATCGCAGGAACGGTCTCACAGTGCA | |
| | | | CCGCTGATAGCCTGCGGACCCCGGGGATGGATGCC | |
| | | | CCCGAACTTCGGGGGACACGAGAGGGAAAATGCCT | |
| | | | GGAGCCAGTCTGTTGTACTGTCTCATGATGCTTTCT | |
| | | | GTGGTTGCGACGATCCTGCTACCCATCTTACTACTC | |
| | | | TGCTATCACGCAGACAAGCTTCTCGTCAGAGTACTC | |
| | | | CTTCTGCTCCACCTCCGCGCCCCCCGCCGCCGTCC | |
| | | | CCGAGGCAGGGCCAGGGGTCTCGGTCGCCTCCGG | |
| | | | GACGAATCAGACCATCCTGGTCCCTCCCGGTAGCC | |
| | | | CCGCCGAGTGAAGGGCCATGGCTGCCTGGTGGTGG | |
| | | | GGCAGGAGGCGGCGATGGCGCCGGTGGAGACGGC | |
| | | | GCCGTCTCCCTCGCCGCCGCCGCTGGCGACGGAG | |
| | | | GAGACGGTGGCCCAGGAGGCGTAGGCGGAGATGG | |
| | | | CCGCGGAGACGCAGACGTCGCGGACCTGCTCGCC | |
| | | | GCCTTAGAAGGAGACGTCGACGCAGAAGGGTAA | |
| FJ392115.1 | ACR20275.1 | ORF2 | ATGTTCCTCGGCAGGCCGTGGAGAAAGAGGAGAGC | 644 |
| | | | GGCAGGGAAGAAAGGGCCACTGCCACTGCAAGCTG | |
| | | | TGCGGGCTGCATCGCAGGAACGGTCTCACAGTGCA | |
| | | | CCGCTGATGGCCTGCGGACCCCGGGGATGGATGCC | |
| | | | CCCGAACTTCGGGGGACACGAGAGAGAAAATGCCT | |
| | | | GGAGCCAGTCTGTTGTACTGTCTCATGATGCTTTCT | |
| | | | GTGGTTGCGACGATCCTGCTACCCATCTTACTACTC | |
| | | | TGCTATCACGCAGACAAGCTTCTCGTCAGAGTACTC | |
| | | | CTTCTGCTCCACCTCCGCGCCCCCCGCCGCCGTCC | |
| | | | CCGAGGCAGGGCCAGGGGTCTCGGTCGCCTCCGG | |
| | | | GGCGAATCAGACCATCCTGGTCCCTCCCGGTAGCC | |
| | | | CCGCCGAGTGAAGGGCCATGGCTGCYTGGTGGTGG | |
| | | | GGCAGGAGGCGGCGATGGCGCCGGTGGAGACGGC | |
| | | | GCCGTYTCCCTCGCCGCCGCCGCTGGCGACGGAG | |
| | | | GAGACGGTGGCCCAGGAGGCGTAGGCGGAGATGG | |
| | | | CCGCGGAGACGCAGACGTCGCAGACCTGCTCGCCG | |
| | | | CCTTAGAAGGAGACGTCGACGCAGAAGGGTAA | |
| GU797360.1 | ADO51764.1 | ORF2 | ATGGCTGAGTTTATGCTGCCCGTCCGCAGAGAGGA | 645 |
| | | | GCCACGGCGGGGGATCCGAACGTCCCGAGGGCGG | |
| | | | GTGCCGGAGGTGAGTTTACACACCGCAGTCAAGGG | |
| | | | GCAATTCGGGCTCGGGACTGGCCGGGCTATGGGCA | |
| | | | AGGCTCTTAAAAAAGCCATGTTTCTCGGTAAATTACA | |
| | | | CAGAAAGAAGAGGGCACTGTCACTGCACGGCCTGC | |
| | | | CAGCTACAAAGAAAAAACCACCTCCTGATATGAACT | |
| | | | ACTGGAGGCCGCCTGTGCACAATGTCCCGGGGCTC | |
| | | | GAACGCCTCTGGTACGAGTCCGTGCATCGTAGCCAT | |
| | | | GCTGCTGTTTGTGGTTGTGGGGATTTTGTACGCCAT | |
| | | | ATTACTGCTCTGGCTGAGAGATACGGCCACCCTGG | |
| | | | GGGACCGCGCGCGCCTGGGGCACCGGGAATAGGG | |
| | | | GGCAATCCCAATTCTCCCCCGATCCGTCGAGCCCG | |
| | | | CCACCCGGCGGCCGCTCCGGAGCCCCCAGCAGGT | |
| | | | AACCAGCCTCCGGCCCTGCCATGGCATGGGGATGG | |
| | | | TGGAAACGAAGGCGCAAGTGGTGGTGGAGACGACG | |
| | | | CTGGACTCGTGGCCGACTTCGCAAACGACGGGCTA | |
| | | | GACGAGCTGGTCGCCGCCCTCGACGAAGAAGAGTC | |
| | | | CCAAAAAACCCAGGGTCGACCTCGGGCCAATCCAA | |
| | | | CAGCAAGAAAGGCCCTCCGATTCACTCCAAAGAGAA | |
| | | | TCGAGGCCGTGGGAGACCAGCGAAGAAGAGAGCGA | |
| | | | AGCAGAAGTCCAGCAAGAAGAGACGGAGGAGGTGC | |
| | | | CCCTCAGACAGCAACTCCTCCACAACCTCAGAGAGC | |
| | | | AGCAGCAACTCCGAAAGGGCCTCCAGTGCGTCTTC | |
| | | | CAGCAGCTAATAAAGACGCAGCAGGGGGTTCACATA | |
| | | | GACCCATCCCTACTGTAGGCCCCAGTCAGTGGCTCT | |
| | | | TCCCCGAGAGAAAGCCTAAACCCCCTCCATCGGCC | |
| | | | GGAGACTGGGCCATGGAGTACCTAGCTTGCAAGAT | |
| | | | ATTCAACAGGCCGCCCCGCACTCACCTTACAGACCC | |
| | | | TCCTTTCTACCCCTACTGCAAAAACAATTACAATGTA | |
| | | | ACCTTTCAGCTCAACTACAAATAA | |
| GU797360.1 | ADO51763.1 | ORF2 | ATGGCTGAGTTTATGCTGCCCGTCCGCAGAGAGGA | 646 |
| | | | GCCACGGCGGGGGATCCGAACGTCCCGAGGGCGG | |
| | | | GTGCCGGAGGTGAGTTTACACACCGCAGTCAAGGG | |
| | | | GCAATTCGGGCTCGGGACTGGCCGGGCTATGGGCA | |
| | | | AGGCTCTTAAAAAAGCCATGTTTCTCGGTAAATTACA | |
| | | | CAGAAAGAAGAGGGCACTGTCACTGCACGGCCTGC | |
| | | | CAGCTACAAAGAAAAAACCACCTCCTGATATGAACT | |
| | | | ACTGGAGGCCGCCTGTGCACAATGTCCCGGGGCTC | |
| | | | GAACGCCTCTGGTACGAGTCCGTGCATCGTAGCCAT | |
| | | | GCTGCTGTTTGTGGTTGTGGGGATTTTGTACGCCAT | |
| | | | ATTACTGCTCTGGCTGAGAGATACGGCCACCCTGG | |
| | | | GGGACCGCGCGCGCCTGGGGCACCGGGAATAGGG | |
| | | | GGCAATCCCAATTCTCCCCCGATCCGTCGAGCCCG | |
| | | | CCACCCGGCGGCCGCTCCGGAGCCCCCAGCAGGT | |
| | | | AACCAGCCTCCGGCCCTGCCATGGCATGGGGATGG | |
| | | | TGGAAACGAAGGCGCAAGTGGTGGTGGAGACGACG | |
| | | | CTGGACTCGTGGCCGACTTCGCAAACGACGGGCTA | |
| | | | GACGAGCTGGTCGCCGCCCTCGACGAAGAAGAGTT | |
| | | | GTTAGAGACCCCTGCACTCAGCCCACCTTCGAACTG | |
| | | | CCCGGAGCCAGTACGCAGCCTCCACGAATACAAGT | |
| | | | CACGGACCCGAAACTCCTCGGTCCCCACTACTCATT | |
| | | | CCACTCGTGGGACCTCAGACGTGGCTACTATAGCAC | |
| | | | AAAGAGTATTAAACGAATGTCAGAACACGAAGAACC | |
| | | | TTCTGAGTTTATTTTCCCAGGTCCCAAAAAACCCAGG | |
| | | | GTCGACCTCGGGCCAATCCAACAGCAAGAAAGGCC | |
| | | | CTCCGATTCACTCCAAAGAGAATCGAGGCCGTGGG | |
| | | | AGACCAGCGAAGAAGAGAGCGAAGCAGAAGTCCAG | |
| | | | CAAGAAGAGACGGAGGAGGTGCCCCTCAGACAGCA | |
| | | | ACTCCTCCACAACCTCAGAGAGCAGCAGCAACTCCG | |
| | | | AAAGGGCCTCCAGTGCGTCTTCCAGCAGCTAA | |
| GU797360.1 | ADO51762.1 | ORF2 | ATGGCTGAGTTTATGCTGCCCGTCCGCAGAGAGGA | 647 |
| | | | GCCACGGCGGGGGATCCGAACGTCCCGAGGGCGG | |
| | | | GTGCCGGAGGTGAGTTTACACACCGCAGTCAAGGG | |
| | | | GCAATTCGGGCTCGGGACTGGCCGGGCTATGGGCA | |
| | | | AGGCTCTTAAAAAAGCCATGTTTCTCGGTAAATTACA | |
| | | | CAGAAAGAAGAGGGCACTGTCACTGCACGGCCTGC | |
| | | | CAGCTACAAAGAAAAAACCACCTCCTGATATGAACT | |
| | | | ACTGGAGGCCGCCTGTGCACAATGTCCCGGGGCTC | |
| | | | GAACGCCTCTGGTACGAGTCCGTGCATCGTAGCCAT | |
| | | | GCTGCTGTTTGTGGTTGTGGGGATTTTGTACGCCAT | |
| | | | ATTACTGCTCTGGCTGAGAGATACGGCCACCCTGG | |
| | | | GGGACCGCGCGCGCCTGGGGCACCGGGAATAGGG | |
| | | | GGCAATCCCAATTCTCCCCCGATCCGTCGAGCCCG | |
| | | | CCACCCGGCGGCCGCTCCGGAGCCCCCAGCAGGT | |
| | | | AACCAGCCTCCGGCCCTGCCATGGCATGGGGATGG | |
| | | | TGGAAACGAAGGCGCAAGTGGTGGTGGAGACGACG | |
| | | | CTGGACTCGTGGCCGACTTCGCAAACGACGGGCTA | |
| | | | GACGAGCTGGTCGCCGCCCTCGACGAAGAAGAGTAA | |
| AB030487.1 | BAA90404.1 | ORF2a | ATGGCTGAGTTTTCCACGCCCGTCCGCAGCGAGAT | 648 |
| | | | CGCGACGGAGGAGCGATCGAGCGTCCCGAGGGCG | |
| | | | GGTGCCGAAGGTGAGTTTACACACCGGAGTCAAGG | |
| | | | GGCAATTCGGGCTCGGGACTGGCCGGGCTATGGGC | |
| | | | AAGGCTCTTAA | |
| AB030488.1 | BAA90407.1 | ORF2a | ATGGCTGAGTTTTCCATGCCCGTCCGCAGCGGTGAA | 649 |
| | | | GCCACGGAGGGAGCTCAGCGCGTCCCGAGGGCGG | |
| | | | GTGCCGAAGGTGAGTTTACACACCGAAGTCAAGGG | |
| | | | GCAATTCGGGCTCGGGACTGGCCGGGCTATGGGCA | |
| | | | AGGCTCTTAA | |
| AB030489.1 | BAA90410.1 | ORF2a | ATGGCTGAGTTTTCTATGCCCGTCCGCAGCGGCGAA | 650 |
| | | | GCCACGGAGGGAGCTCAGCGCGTCCCGAGGGCGG | |
| | | | GTGCCGGAGGTGAGTTTACACACCGAAGTCAAGGG | |
| | | | GCAATTCGGGCTCGGGACTGGCCGGGCTATGGGCA | |
| | | | AGGCTCTTAA | |
| AB030487.1 | BAA90405.1 | ORF2b | ATGCACTTTTCTAGGATATCCAGAAAGAAAAGGCTA | 651 |
| | | | CTGCTACTGCAAACAGTGCCAGCTCCACAGAAAACT | |
| | | | TTCAAACTTTTAAGAGGTATGTGGAGTCCTCCCACT | |
| | | | GACGATGAACGTGTCCGCGAGCGAAAATGGTTCCT | |
| | | | CGCAACTGTTTATTCTCACTCTGCTTTCTGTGGCTGC | |
| | | | AATGATCCTGTCGGTCACCTCTGTCGCTTGGCTACT | |
| | | | CTTTCTAACCGTCCGGAGAACCCGGGACCCTCCGG | |
| | | | GGGACGTCGTGCTCCTTCGATCGGGGTCCTACCCG | |
| | | | CTCTCCCGGCTGCTACCGAGCAGCCCGGTGATCGA | |
| | | | GCACCATGGCCTATGGGTGGTGGAGGAGACGCCGC | |
| | | | AGAAGGTGGAAGAGATGGAGGAGAAGGCCCAGGTG | |
| | | | GAGACGCCCATGGAGGACCCGCAGACGCAGACCTG | |
| | | | CTAGACGCCGTGGACGCCGCAGAACAGTAA | |
| AB030488.1 | BAA90408.1 | ORF2b | ATGCACTTTTCTAGGATACGCAGAAAGAAAAGGCTA | 652 |
| | | | CTGCTACTGCAAACAGTGCCAGCTCCACAGAAAACT | |
| | | | CTCAAACTTTTAAAAGGTATGTGGAGTCCTCCCACC | |
| | | | GACGATGAACGTGTCCGCGAGCGAAAATGGTTCCT | |
| | | | CGCAACTATTTATTCTCACTCTACTTTCTGTGGCTGC | |
| | | | AATGATCCTGTCGGTCACTTCTGTCGCCTGGCTACT | |
| | | | CTGTCTAACCGCCCGGAAAACCCGGGACCCTCCGG | |
| | | | AGGACGTAGTGCTCCTCAGATCGGGCTCCTACCCG | |
| | | | CTCTCCCGGCTGCTCCCGAGCAACCCGGTGATCGA | |
| | | | GCACCATGGCTTATGGGTGGTGGAGGAGACGCCGC | |
| | | | AGGAGGTGGAAGAGATGGAGGAGAAGGCCCAGGT | |
| | | | GGAGACGCCCATGGAGGACCCGCAGACGCAGACCT | |
| | | | GCTGGACGCCGTGGACGCCGCAGAACAGTAA | |
| AB030489.1 | BAA90411.1 | ORF2b | ATGCACTTTTCTAGGATACACAGAAAGAAAAGGCTA | 653 |
| | | | CTGCCACTGCAAACAGTGCCAACTCCACAGAAAACT | |
| | | | CTCAAACTTTTAAAAGGTATGTGGAGTCCTCCCACC | |
| | | | GACGATGAACGTGTCCGCGAGCGAAAATGGTTCCT | |
| | | | CGCAACTATCTATTCTCACTCTACTTTCTGTGGCTGC | |
| | | | AATGATCCTGTCGCTCATTTCTGTCGCCTGGCTACT | |
| | | | CTCTCTAACCGCCCGGAAAACCCGGGACCCTCCGG | |
| | | | AGGACGTAGTGCTCCTCAGATCGGGCTCCTACCCG | |
| | | | CTCTCCCGGCTGCTCCCGAGCAACCCGGTGATCGA | |
| | | | GCCCCATGGCCTATGGGTGGTGGAGGAGACGCCGC | |
| | | | AGGAGGTGGAAGAGATGGAGGAGAAGGCCCAGGT | |
| | | | GGAGACGCCGCTGGAGGACCCGCAGACGCAGACC | |
| | | | TGCTGGACGCCGTAGACGCCGCAGAACAGTAA | |
| AB038340.1 | BAA90824.1 | ORF2s | ATGTTTATTGGCAGGCATTACAGAAAGAAAAGGGCG | 654 |
| | | | CTGTCACTGTGTGCTGTGCGAACAACAAAGAAGGCT | |
| | | | TGCAAACTACTAATAGTAATGTGGACCCCACCTCGC | |
| | | | AATGATCAACAGTACCTTAACTGGCAATGGTACTCAA | |
| | | | GTGTACTTAGCTCCCACGCTGCTATGTGCGGGTGTC | |
| | | | CCGACGCTGTCGCTCATTTTAATCATCTTGCTTCTGT | |
| | | | GCTTCGTGCCCCGCAAAACCCACCCCCTCCCGGTC | |
| | | | CCCAGCGAAACCTGCCCCTCCGACGGCTGCCGGCT | |
| | | | CTCCCGGCTGCGCCAGAGGCGCCCGGAGATAGAG | |
| | | | CACCATGGCCTATGGCTGGTGGCGCCGAAGGAGAA | |
| | | | GACGGTGGCGCAGGTGGAGACGCAGACCATGGAG | |
| | | | GCGCCGCTGGAGGACCCGAAGACGCAGACCTGCTA | |
| | | | GACGCCGTGGCCGCCGCAGAAACGTAA | |
| AB038340.1 | BAA90826.1 | ORF3 | ATGTTTGGTGACCCCAAACCTTACAACCCTTCCAGT | 655 |
| | | | AATGACTGGAAAGAGGAGTACGAGGCCTGTAGAATA | |
| | | | TGGGACAGACCCCCCAGAGGCAACCTAAGAGACAC | |
| | | | CCCTTTCTACCCCTGGGCCCCCAAGGAAAACCAGTA | |
| | | | CCGTGTAAACTTTAAACTTGGATTTCAATAA | |
| AB038622.1 | BAA93587.1 | ORF3 | ATGATGAATATGTTGCAGGGCCTTTACCAAGAAAAA | 656 |
| | | | GAAACAAATTCGATACCAGAGCCCAAGGGCTGCAAA | |
| | | | CCCCCGAAAAAGAAAGCTACACTTTACTCCAAGCCC | |
| | | | TCCAAGAGTCGGGGCAAGAGACCAGCTCAGAAGAC | |
| | | | CAAGAACAAGCACCCCAAGAAAAAGAGGGTCAGAA | |
| | | | GGAAGCGCTCATGGAGCAGCTCCAGCTCCAGAAAC | |
| | | | AGCACCAGCGAGTCCTCAAGCGAGGCCTCAAACTC | |
| | | | CTCCTCGGAGACGTCCTCCGACTCCGGAGAGGAGT | |
| | | | CCACTGGGACCCCCTCCTGTCATAATTCAGGGCCCC | |
| | | | TCTATCCCAGACCTGCTTTTCCCTAA | |
| AB038623.1 | BAA93590.1 | ORF3 | ATGATGAATATGTTGCAGGGCCTTTACCAAGAAAAA | 657 |
| | | | GAAACAAGTTCGATACCAGAGCCCAAGGGCTCCAAA | |
| | | | GCCCCGAAAAAGAAAGCTACACTTTACTCCAAGCCC | |
| | | | TCCAAGAGTCGGGGCAAGAGAGCAGCTCAGAAGAC | |
| | | | CAAGAACAAGCACCCCAAGAAAAAGAGGGTCAGAA | |
| | | | GGAAGCGCTCATGGAGCAGCTCCAGCTCCAGAAAC | |
| | | | AGCACCAGCGAGTCCTCAAGCGAGGCCTCAAACTC | |
| | | | CTCCTCGGAGACGTTCTCCGACTCCGGAGAGGAGT | |
| | | | ACACTGGGACCCCCTCCTGTCATAATTCAGGGCCCC | |
| | | | TCTATCCCAGACCTACTTTTCCCTAA | |
| AB038624.1 | BAA93593.1 | ORF3 | ATGATGAATATGTTGCAGGGCCTTTACCAAGAAAAA | 658 |
| | | | GAAACAAGTTCGATACCAGAGCCCAAGGGCTCCAAA | |
| | | | GCCCCGAAAAAGAAAGCTACACTTTACTCCAAGCCC | |
| | | | TCCAAGAGTCGGGGCAAGAGACGAGCTCAGAAGAC | |
| | | | CAAGAACAAGCACCCCAAGAAAAAGAGGGTCAGAA | |
| | | | GGAAGCGCTCATGGAGCAGCTCCAGCTCCAGAAAC | |
| | | | AGCACCAGCGAGTCCTCAAGCGAGGCCTCAAACTC | |
| | | | CTCCTCGGAGACGTTCTCCGACTCCGGAGAGGAGT | |
| | | | ACACTGGGACCCCCTCCTGTCATAATTCAGGGCCCC | |
| | | | TCTATCCCAGACCTGCTTTTCCCTAA | |
| AB050448.1 | BAB19926.1 | ORF3 | ATGAGCTTTGTAGAACCCTTACTAACCAGCACCCAC | 659 |
| | | | AGAGAGATAGCATACTACCATGGCTGTGTTCAGATG | |
| | | | CACAAAGCCTTCTGTGGGTGTGACAACTTTCTTACC | |
| | | | CACCTGCAACGCATAACAACATACATCTCTGCTAAC | |
| | | | CAACACACTCCACCCAGCACACCCTCAAACACCCTC | |
| | | | CGTAGAGCCCGGGCCCTGCCCGCGGCTCCGGAGC | |
| | | | CAGCTCCATGGCGTGGACCTGGTGGTGGCAGAGGA | |
| | | | GGCGCCGAAGGTGGCCGTGGAGAAGGAGAAGGTG | |
| | | | GAGAAGACTACGCACAAGAAGACCTAGACGCCTTGT | |
| | | | TCGACGCCGTCGCAAGAGATACAGAGTTATCAGAAA | |
| | | | CCCTTGTAAAACAGAAGGACACGATCTCCCTCACAC | |
| | | | CAGTAGACTCCATCGCGACTTACAAGTTGTTGACCC | |
| | | | ACACACCGTGGGCCCCCAATGGGCGCTCCACACCT | |
| | | | GGGACTGGCGACGTGGACTCTTTGGTTCAGAGGCT | |
| | | | ATCAAAAGAGTGTCTGAACAACAAGTACATGATGAA | |
| | | | CTGTATTACCCACCTTCAAAGAAACCTCGATTCCTCC | |
| | | | CTCCAATATCAGGCCTCCAAGAGCAAGAAAGAGACT | |
| | | | ACAGTTCGCAGGAGGAGAAAGAACAGTCCTCCTCA | |
| | | | GAAGAAGAGACGGACCCGAAGAAAAAAGAGCAAAA | |
| | | | ACAGCAGCAGCGACTCCACCTCCAGTTCCAAGAGC | |
| | | | AGCAGCGACTCGGAAACCAACTCCGACTCATCTTCC | |
| | | | GAGAGCTACAGAAAACCCAAGCGGGTCTCCACTTAA | |
| AF371370.1 | AAK54733.1 | ORF3 | ATGGCGTGGTCGTGGTGGTGGAGGCGAAGGAAACG | 660 |
| | | | CTGGTGGCCGCGCAGAAGGAGGCGATGGAGAAGG | |
| | | | CTACGAACCCGAAGAACTGGAAGAGCTGTTCCGCG | |
| | | | CCGCCGCCGCCGACGACGAGTAAGGAGGCGCCGG | |
| | | | TGGGGGAGGCGACCGCGTAGGAGACGGGTGTACTA | |
| | | | TAAGAGACGCAGACGAAAGACTGGCAGACTGTATAG | |
| | | | AAAGCCTAAAAAAAAACTAGTACTGACTCAATGGCA | |
| | | | CCCCACTACAGTTAGAAACTGCTCCATACGGGGCTT | |
| | | | AGTGCCCCTAGTCCTCTGCGGACACACACAGGGAG | |
| | | | GCAGAAACTTTGCTTTGAGGAGCGATGACTACCCCA | |
| | | | AACAAGGCACCCCATACGGGGGCAGCTTCAGCACT | |
| | | | ACAACCTGGAACCTCAGGGTGCTTTTCGACGAGCAC | |
| | | | CAAAAACACCACAATACGTGGAGCTATCCAAGCAAT | |
| | | | CAACTAGACCTAGCCAGATTTAGAGGCAGCATATTT | |
| | | | TACTTTACAGAGACAAAAAAACTGACTACATAG | |
| AB060596.1 | BAB69914.1 | ORF3 | ATGAGCTGGTGTACTCCAGTTGAAAATGCCTATAAG | 661 |
| | | | AGAGAGATCCACTTTCTCAGGGGCTGTCAACTGCTT | |
| | | | CACACTAGCTTTTGTGGTTGCGATGATTTTATTAATC | |
| | | | ATATTATTCGCCTACAAAATCTTCACGGCAACCTACA | |
| | | | CCAGCCCACGGGACCGTCCACACCTCCAGTGACCC | |
| | | | GTAGAGCTCTGGCCTTGCCGGCTGCTCCGGAGTCA | |
| | | | TGGCGTTCCGGTGGTGGTGGTGGAGACGCCGCCC | |
| | | | GCAGCGACGATGGACCCGGCGCCGATGGAGGAGA | |
| | | | CTACGAACCCGCCGACCTAGACGCACTGTACGACG | |
| | | | CCGTCGCCGCAGACCAAGAATTATCAAAAACCCGTG | |
| | | | TAAAAAAGAAGAATCCACATTCACCTATCCCAGTAGA | |
| | | | GAGCCTCGCGACCTACAAGTTGTTGACCCACTCACC | |
| | | | ATGGGCCCAGAATGGGTCTTCCACACATGGGACTG | |
| | | | GAGACGTGGACTTTTTGGTAAAAATGCTGTCGACAG | |
| | | | AGTGTCAAAAAAACCAGACGATGATGCAGAATATTAT | |
| | | | CCAGTACCAAAAAGGCCTCGATTCTTCCCTCCAACA | |
| | | | GACACACAGTCAGAGCCAGAAAAAGACTTCGGTTTC | |
| | | | ACACCGGAGAGCCAAGAGTTACAGCAAGAAGACTTA | |
| | | | CGAGCACCCCAAGAAGAAAGCCAAGAGGTACAGCA | |
| | | | GCAGCGACTGCTCCAGCTCAGACTCTCACAGCAGTT | |
| | | | CAGACTCAGACAGCAGCTCCAGCACCTGTTCGTACA | |
| | | | AGTCCTCAAAACCCAAGCAGGTCTCCACATAA | |
| AB060592.1 | BAB69898.1 | ORF3 | ATGAGCTTTGTAGAACCGTTACTAAGCAGCACCCAC | 662 |
| | | | CGAGAGATAGCATTCTACCATGGCTGTGTTCAAATG | |
| | | | CACAAGGCCTTCTGTGGCTGTGACAACTTTCTTACC | |
| | | | CACCTGCAGCGCATAACAACATACATCTCTGCTAAT | |
| | | | CAACACACTCCACCCAGCACACCCTCAAACACCCTC | |
| | | | CGTAGAGCCCGGGCCCTGCCCGCGGCTCCGGAGC | |
| | | | CAGCTCCATGGCGTGGACCTGGTGGTGGCAGAGGA | |
| | | | GGCGCCGAAGGTGGCCGTGGAGAAGGAGAAGGTG | |
| | | | GAGAAGACTACGCACCAGAAGACCTAGACGACTTGT | |
| | | | TCGCCGCCGTCGCAAGAGATACAGAGTTATCAGAAA | |
| | | | CCCTTGTAAAACAGAAGGACACGATCTCCCTCACAC | |
| | | | CAGTAGACTCCATCGCGACTTACAAGTTGTTGACCC | |
| | | | ACACACCGTGGGCCCCCAATGGGCGCTCCACACCT | |
| | | | GGGACTGGCGACGTGGACTCTTTGGTTCAGAGGCT | |
| | | | ATCAAAAGAGTGTCTGAACAACAAGTACATGATGAA | |
| | | | CTGTATTACCCAGCTTCAAAGAAACCTCGATTCCTCC | |
| | | | CTCCAATATCAGGCCTCCAAGAGCAAGAAAGAGACT | |
| | | | ACAGTTCGCAGGAGGAAAAAGACCAGTCCTCCTCAG | |
| | | | AAGAAGAGAAGGACCCGAAGAAAAAAGAGCAAAAAC | |
| | | | AGCAGCAGCGACTCCACCTCCAGTTCCAAGAGCAG | |
| | | | CAGCGACTCGGAAACCAACTCCGACTCATCTTCCGA | |
| | | | GAGCTACAGAAAACCCAAGCGGGTCTCCACATAA | |
| AB060593.1 | BAB69902.1 | ORF3 | ATGAGTCTGTGGCGACCCCCGGTCCACAATGCCCC | 663 |
| | | | CGGCAGAGAGAGACTTTGGTTTCAGGCCTGTTACGA | |
| | | | ATCTCACAGTGCTTTTTGTGGCTGTGGTAGCTTTATT | |
| | | | CTTCATCTTACTAGCTTGGCTGCACGTTTTAATTTTC | |
| | | | AGGCCGGGCCACCGCCTCCCGGGGGTCCCCGGGC | |
| | | | GGAGACCCCGCCGATTCTGAGGGCGCTGCCGGCAC | |
| | | | CCCAGCCGCGCCGCCACCGCCAGACGGAGAACCC | |
| | | | CGGGTCTGAGCCATGGCCTGGAGATGGTGGTGGAG | |
| | | | ACGGCGCTGGAAGCCAAGAAGGCGGCCAGCGTGG | |
| | | | ACCAAGTACCGCAGACGCAGGTGGAGACGACTTCG | |
| | | | ACCCCGCAGACCTAGAAGACTTGCTCGCGGCCGTC | |
| | | | GAAGAAGACGAACAGTCATCAAAGACCCGTGCAGCT | |
| | | | CCTCAGGACTGGCACCTACCGACTCCAGTAGATTCA | |
| | | | AGCGGGATGTACAAGTCGTTAGCCCGCTCACAATG | |
| | | | GGGCCCCGACTGCTATTCCACTCGTTCGACCAAAGA | |
| | | | CGAGGGTTCTTTACTCCAGGAGCTATCAAACGAATG | |
| | | | CATGATGAACAAATTAATGTTCCAGACTTTACACAAA | |
| | | | AACCTAAAATCCCGCGAATTTTCCCACCAGTCGAGC | |
| | | | TCCGAGAAAGAGCAGAAGCCGAAGAAGACTCAGGT | |
| | | | TCGGAAAAAGCGTCGTTCACCTCGTCGCAAGAGAGA | |
| | | | GAAGCCGAAGCCCAAGAAAAGTTACCGATACAGCTC | |
| | | | CAGCTCAGACAGCAGCTCAGACAACAACAGCAGCT | |
| | | | CCGAGTCCACTTGCAGCAAGTCTTCCTCCAACTCCA | |
| | | | AAAAACGAAGGCACATTTACATATAA | |
| AB060595.1 | BAB69910.1 | ORF3 | ATGAATCTCTGGCGACCCCCTCTGAGAAATATCCCC | 664 |
| | | | CACAGGGAGAGATGTTGGCTTGAGGCCTGTCTCAG | |
| | | | AGCCCACGATTCTTTTTGTGGCTGTCCTAGTCCTATT | |
| | | | GTTCATTTTTCTAGTCTGGTTGCACGTTTTAATCTAC | |
| | | | AAGGAGGCCCGCCGCCAGAGGATGACTCCCCACAG | |
| | | | GGCGCGCCAGTCCTGAGGGCCCTGCCGGCACCGA | |
| | | | GCCCCCACAGGCACACCCGCACGGAGAACCCCTCC | |
| | | | GGTGAGCCATGGCCTACTCCTACTGGTGGCGCCGC | |
| | | | CGGAGGTGGCCGTGGAGAGGCCGATGGAGGCGCT | |
| | | | GGAGGCGCCGCAGACGAATACCGCGCCGAAGACCT | |
| | | | AGACGACCTGTTCGCCGCTATCGAAGGAGACCAAC | |
| | | | GATCAGAAACCCGTGCACCTCGGACGGACAGACGC | |
| | | | CCACAACCAGTAGACAGTCTAGAGAGGTACAAATCG | |
| | | | TTGACCCGCTCACCATGGGACCCCGATACGTATTCC | |
| | | | ACTCGTGGGACTGGCGACGTGGGTGGCTTAATGAC | |
| | | | AGAACTCTCAAACGCTTGTTCCAAAAACCGCTCGAT | |
| | | | TTTGAAGAGTATCCAAAATCTCCAAAGAGACCTAGAA | |
| | | | TTTTCCCACCCACAGAGCAGCTCCAAGAAGACCCGC | |
| | | | AAGAGCAAGAAAGAGACTCCTCTTCTTCGGAAGAAA | |
| | | | GTCTCCCTACATCGTCAGAAGAGACACCGCCAGCC | |
| | | | CACCTACTCAGAGTACACCTCAGAAAGCAGCTCCGG | |
| | | | CAACAGCGAGACCTCCGAGTCCAGCTCAGAGCCCT | |
| | | | GTTCGCCCAAGTCCTCAAAACGCAAGCGGGCCTAC | |
| | | | ACATAA | |
| AB064596.1 | BAB79312.1 | ORF3 | ATGCCGTGGAGACCGCCGGCTCATAACGTCCAGGG | 665 |
| | | | GCGAGAGAGCCAGTGGTTCGCGGCTTGTTTTCACG | |
| | | | GCCACGCTTCGTTTTGCGGCTGCGGTGACTTTATTG | |
| | | | GGCATATTAACAGCCTTGCTCCTCGCTTTCCTAACAA | |
| | | | CCAAGGACCCCCGCATCCACCTGCCTTAAACAGGC | |
| | | | CACCTGCACAGGGCCCAGAAAGCCCCGGGGGTTCC | |
| | | | ATACTACCCCTGCCAGCCCTACCGGCACCACCTGAT | |
| | | | CCGCCACCACGGCCTGGTGGTGGGGAAGACGGTG | |
| | | | GCGACGCCGCCCGTGGGGCCGCTGGCGCCGCCGA | |
| | | | AGGCGCGTATGGAGAAGAAGACCTAGAACTGCTGTT | |
| | | | CGCCGCCGCCGAGGAAGACGATATGCAATCGACGA | |
| | | | CCCCTGCCAGCAGGGAACCCACCCGCTTCCCGAGC | |
| | | | CCGGTACGTTGCCTAGAATCTTACAAGTCAGCGACC | |
| | | | CGACGCAACTCGGACCGAAAACCATATTCCACCTCT | |
| | | | GGGACCAGAGGCGTGGACTTTTTAGCAAAAGAAGTA | |
| | | | TTGAAAGAATGTCAGAATACAAAGGAACTGATGACTT | |
| | | | ATTTTCACCAGGTCGCCCAAAGCGCCCAAAGCTCGA | |
| | | | CACACGTCCCGAAGGACTACCAGAGGAGCAAAGAG | |
| | | | GAGCTTACAATTTACTCCAAGCCCTCGAAGACTCAG | |
| | | | CCCAGTCGGAAGAAAGCGACCAAGAAGAAATGCCT | |
| | | | CCCCTCGAAGAAGAACAAGTACTCCACGAGCAAAAG | |
| | | | AAAGAGGCGCTCCTCCAGCAGCTCCAGCAGCAGAA | |
| | | | ACACCACCAGCGAGTCCTCAAGCGAGGCCTCAGAC | |
| | | | TCCTCCTCGGAGACGTCCTGA | |
| AB064597.1 | BAB79316.1 | ORF3 | ATGCCGTGGAGACCGCCGGTGCATAGTGTCCAGGG | 666 |
| | | | GCGAGAGGATCAGTGGTTCGCGAGCTTTTTTCACGG | |
| | | | CCACGCTTCATTTTGCGGTTGCGGTGACGCTGTTGG | |
| | | | CCATCTTAATAGCATTGCTCCTCGCTTTCCTCGCGC | |
| | | | CGGTCCACCAAGGCCCCCTCCGGGGCTAGAGCAGC | |
| | | | CTAACCCCCCGCAGCAGGGCCCGGCCGGGCCCGG | |
| | | | AGGGCCGCCCGCCATCTTGGCGCTGCCGGCTCCGC | |
| | | | CCGCGGAGCCTGACGACCCGCAGCCACGGCGTGG | |
| | | | TGGTGGGGACGGTGGCGCCGCCGCTGGCGCCGCA | |
| | | | GGCGACCGTGGAGACCGAGACTACGACGAAGAAGA | |
| | | | GCTAGACGAGCTTTTCCGCGCCGCCGCCGAAGACG | |
| | | | ATTTGGAACCCACCCGATTCCCGACCCCGATAAGCA | |
| | | | CCCTCGCCTCCTACAAGTGTCGAACCCGAAACTGCT | |
| | | | CGGACCGAGGACAGTGTTCCACAAGTGGGACATCA | |
| | | | GACGTGGGCAGTTTAGCAAAAGAAGTATTAAAAGAG | |
| | | | TGTCAGAATACTCATCGGATGATGAATCTCTTGCGC | |
| | | | CAGGTCTCCCATCAAAGCGAAACAAGCTCGACTCGG | |
| | | | CCTTCAGAGGAGAAAACCCAGAGCAAAAAGAATGCT | |
| | | | ATTCTCTCCTCAAAGCACTCGAGGAAGAAGAGACCC | |
| | | | CAGAAGAAGAAGAACCAGCACCCCAAGAAAAAGCC | |
| | | | CAGAAAGAGGAGCTACTCCACCAGCTCCAGCTCCA | |
| | | | GAGACGCCACCAGCGAGTCCTCAGACGAGGGCTCA | |
| | | | AGCTCGTCTTTACAGACATCCTCCGACTCCGCCAGG | |
| | | | GAGTCCACTGGAACCCCGAGCTCACATAGAGCCCC | |
| | | | CACCTTACATACCAGACCTACTTTTTCCCAATACTGG | |
| | | | TAA | |
| AB064599.1 | BAB79324.1 | ORF3 | ATGCCGTGGTCTCTGCCGAGACATAATATCAGAACG | 667 |
| | | | AGAGAAGATCTCTGGGTGCAATCGATTCTTTATTCAC | |
| | | | ATGACACTTTTTGTGGCTGTGATAATATTCCTGAGCA | |
| | | | TCTTACTGGCCTCCTGGGCGGCGTACGACCAGCTC | |
| | | | CACCTAGAAACCCAGGACCCCCTACCATACGGAGC | |
| | | | CTGCCGGCACTGCCGCCAGCTCCGGAACCCCCTGA | |
| | | | GGAACCACGGCGTGGTGGAGATACAGACGGAGACC | |
| | | | GTGGAGAAGATGGAGGAGACGCCGCTGGGGCCTAC | |
| | | | GAACCCGAAGACCTAGAAGAACTTTTCGCCGCCGC | |
| | | | CGAGCAAGACGATATCCCATTGACGACCCCTGCCAA | |
| | | | AAAGGAAAACACGACATTCCCGACCCCGATACAAAC | |
| | | | CCTCCAAGAATACAAATATCAGACCCGCAACACCTC | |
| | | | GGACCGGCGACGCTGTTCCACTCGTGGGACCTCAG | |
| | | | ACGTGGATATATTAATACAAAAAGTATTAAAAGAATC | |
| | | | TCAGAACACCTCGATGCTAATGAATATTTTTCGACAG | |
| | | | GCGTCGTGTCCAAAAAACCCCGATTCGACACTCCCC | |
| | | | ACCACGGGCAGCTATCAAACCAAGAAGAAGACGCC | |
| | | | TTGTCTATCCTCAGACAACCCCAAAAAGAGCAAGAA | |
| | | | GAGACCACCTCCGAGGAAGAACAAGCACTCCAAAAA | |
| | | | GAAGAGGAGCAAAAAGAAAAGCTCCTACAGCAACTC | |
| | | | AGAGTCCAGCGACAGCACCAGCGAGTCCTCAGACA | |
| | | | GGGAATCAAACACCTCATGGGAGACGTCCTCCGACT | |
| | | | CAGACAGGGAGTCCACTGGAACCCAGTCCTATAATA | |
| | | | CTTCCACCAGAACCAATACCAGACCTCTTATTCCCC | |
| | | | AATACTGGTAA | |
| AB064600.1 | BAB79328.1 | ORF3 | ATGTCGTGGAGACCGCCGAGCCAAAATTTACTGCAA | 668 |
| | | | AGAGAAGAGGCCTGGTACTCAGCTTTTCTTAGCTCG | |
| | | | CATTCTACATTTTGCGGTTGTACTGACCCTCTGCTGC | |
| | | | ATATTACTCTCATTGCTGGCCGCCTTACTAACCCCGT | |
| | | | ACCCGTCACCCGCCAACCGGAGACCCCTCCTAACG | |
| | | | GCCTCAGGGGGCTGCCGGCACTGCCAGCACCCCCT | |
| | | | GAACCACCAGCACCGCCACCACGGCCTGGGGATGG | |
| | | | TACCGGAGAAGAAGATGGCGCCCATGGAGAAGGAG | |
| | | | AAGGTGGGCGATACGCAGAAGAAGACCTAGAAGAA | |
| | | | CTGTTCGCCGCCGCGGCAGAAGACGATATCCTATC | |
| | | | GACGACCCCTACCAAAAACCCACCCACGAAATACCC | |
| | | | GACCCCGATAAGCACCCTCCAAGACTACAAATTGCA | |
| | | | GACCCGAAAATCCTCGGACCGTCGACAGTCTTCCAC | |
| | | | ACATGGGACATCAGACGTGGCCTCTTTAGCACAGCA | |
| | | | AGTCTTAAGAGAGTGTCAGAATACCAACCGCCTGAT | |
| | | | GACCTTTTTTCAACAGGCGTCGCATCCAAAAGACCC | |
| | | | CGATTCGACACTCCAGTCCAAGGGCAGCTCGAAAG | |
| | | | CCAAGAAGAAGAAAGCTATCGTTTACTCAGAGCACT | |
| | | | CCAAAAAGAGCAAGAGACAAGCAGCTCGGAAGAGG | |
| | | | AGCAGCCACAAAACCAAGAGATCCAAGAAAAACTAC | |
| | | | TCCTCCAGCTCCAGCAGCAGCGACAACAGCAGCGA | |
| | | | CTCCTCGCAAAGGGAATCAAGCACCTCCTCGGAGAT | |
| | | | GTCCTCCGACTCCGAAAAGGAGTCCACTGGGACCC | |
| | | | GGTCCTTACATAGCACCTCCAGAACCTATCCCAGAC | |
| | | | CTTTTGTTCCCCAGTACTAA | |
| AB064601.1 | BAB79332.1 | ORF3 | ATGTCGTGGGCTCCGCCGCTATTCAACTCGAAACAG | 669 |
| | | | AGAGAGGACCAGTGGTACCAGTCAATTATTTTCAGC | |
| | | | CATAATACTTTTTGCGGCTGCGGTGACCTTGTTAGG | |
| | | | CATTTTTGCGTCGTTGCTTCTCGCTTTACTGAGCCTC | |
| | | | CTGTAGTGCCGGCCCTACCGGCACCGGTACCGGCA | |
| | | | CCGCCACGGCGTGGTACAGAAGAAGAAGGTGGAGA | |
| | | | CCGTGGAGAAGACGCCGCAGACCGTGGACCCTACG | |
| | | | CAGAAGAAGAGCTAGAAGATTTGTTCGCCGCCGCC | |
| | | | CGAGAAGACGATATCCCATCGACGACCCCTGCCAAA | |
| | | | AAGACACCCACGAAATACCCGACCCCGATAAACACC | |
| | | | CTAGAGGAATACAAATATCAGACCCGAAGGTACTCG | |
| | | | GACCACCCACAGTCTTCCACACATGGGACATCAGAC | |
| | | | GTGGACTGTTTAGCTCGACGAGTCTTAAAAGAGTGT | |
| | | | CAGAATACCAACCGCCTGATGACCCTTTTTCAACAG | |
| | | | GCGTCGTCTTCAAAAGACCCCGACTGGAAACCCAGT | |
| | | | ACAAAGGAACCCAAGAAACCCCAGAAGAAGACGCC | |
| | | | TACACTTTACTCAAAGCACTCCAAAAAGAGCAAGAG | |
| | | | AGCAGCAGCTCGGAAGAAGAACTCCCACAAGAAGA | |
| | | | GCAAGAGATCCAAAAAACACAACTCCTCAAGCAGCT | |
| | | | CCAACTCCAGCAGCAGCAACAGCGAATCCTCAAGA | |
| | | | GGGGAATCAGACACCTCTTCGGAGACGTCCTCCGA | |
| | | | CTCAGAAAAGGAGTCCACTCCAACCCAGACCTATTA | |
| | | | TAATACCAGCAGAGGAAATCCCAGACCTGCTTTTCC | |
| | | | CCAATACTGGTAA | |
| AB064602.1 | BAB79336.1 | ORF3 | ATGCCGTGGCATCCACCGGGCTACAACGTTCAACA | 670 |
| | | | GAGAGAAGAGCTCTGGGTACAGACAGTTACTACTTC | |
| | | | ACATGCTACTTTTTGCGGCTGTGGTGACCCTAGTAG | |
| | | | CCATCTTCACCGCATTCTTAGCCGCCTTAATAACAG | |
| | | | CAGCCGGCGGCCCCCCGAAACCCCAAACCCCATTC | |
| | | | GTGCCCTACCGGCCCTACCGGCACCCCAAGAACCT | |
| | | | GAACAGCCGCCATCACGGCCTGGTACCGGTACAGA | |
| | | | AGAAGGCCATGGCGCCGAAGGAGGCGACCGAGGT | |
| | | | GGGGCCTACGCAGAAGAAGATTTAGAAGATCTTTTC | |
| | | | GCGGCCGCGGAAGAAGACGATATCCCATCGACGAC | |
| | | | CCATGCCAAAAGCCCACCCACGACCTTCCCGACCC | |
| | | | CGATAGACACCCCCCAAGAATACAAATCTCGGACCC | |
| | | | GGCAAGACTCGGACCGGAGACGCTCTTCCACTCAT | |
| | | | GGGACATCAGACGTGGATACATTAACACAAAAGCTA | |
| | | | TTAAAAGAATCTCAGATTACACAGAATCTAATGACTA | |
| | | | TTTTTCAACAGGCGTCGTGTCAAAAAGACCCCGATT | |
| | | | GGAAACCCAGTACCACGGCCAACACGAAAGCCAAG | |
| | | | AAGAAGACGCCTATCTTTTACTCAAACAACTCCAGG | |
| | | | AAGAGCAAGAAACGAGCAGTTCGGAGGGAGAACAA | |
| | | | GCACCCCAAGAAAAAACACTCCAAAAAGAAAAGCTC | |
| | | | CTCAAGCAGCTGCAGCTCCACAAGCAGCAGCAGCA | |
| | | | ACTCCTCAGAAAAGGAATCAGACACCTCCTCGGGGA | |
| | | | CGTCCTCCGACTCAGACGGGGAGTCCACTGGGACC | |
| | | | CAGGCCTATAGTACTGCCTCCAGAGCCTATTCCAGA | |
| | | | CTTGCTTTTCCCAAATACTAA | |
| AB064603.1 | BAB79340.1 | ORF3 | ATGTCGTGGCGACCGCCGTTGCATTCTATCCAAGGC | 671 |
| | | | AGAGAAGATCAATGGTATGCAGGCATCTTTCATACG | |
| | | | CATTTTGCTTTTTGCGGTTGTGGTGACCCTGTTGGG | |
| | | | CGTATTAACCGCATTGCTCACCGCTTTCCTAACGCC | |
| | | | GGTCCCCCGAGACCACCTCCAGGGCTAGACCAGCC | |
| | | | CAACCTCGGAGGGCCGGAAGGTCCAGGAGGTGCC | |
| | | | CCTAGAGCCCTGCCAGCCCTGCCGGCCCCGGCAGA | |
| | | | GCCAGAGCCGGCACCACGGCGTGGTGGTGGGGCC | |
| | | | GATGGAGACAGCGCCGCTGGGGCCGCCGCCGCCG | |
| | | | CAGACCATGGAGGGTACGACGAAGGAGACCTAGAA | |
| | | | GATCTTTTCGCCGCCGCCGCCGAGGACGATATGCA | |
| | | | ATCGACGACCCCTGCCAGAAGCCCACCCATGAGCT | |
| | | | ACCCGATCCCGATAGACACCCTCGCATGTTACAAGT | |
| | | | CTCTGACCCGACAAAGCTCGGACCGAAGACAGTGTT | |
| | | | CCACAAATGGGACTGGAGACGTGGGCAACTTAGCA | |
| | | | AAAGAAGTATTAAAAGAGTCCAAGAAGACTCAACGG | |
| | | | ATGATGAATATGTTACAGGGCCTTTATCAAGAAAAAG | |
| | | | AAACAAGCTCGACACAAAGATGCCAGGCCCCCCAA | |
| | | | CCCCCGAAAAAGAAAGCTACACTTTACTCCAAGCCC | |
| | | | TCCAAGAGTCGGGCCAGGAGAGCAGCTCCCAGGAC | |
| | | | GAAGAACAAGCACCCCAAAAAGAAGAGAACCAGAAA | |
| | | | GAAGCGCTCGTGGAGCAGCTCCAGCTCCAGAAACA | |
| | | | GCACCAGCGAGTCCTCAAGCGAGGCCTCAAACTCC | |
| | | | TCTTGGGAGACGTCCTCCGACTCCGCCGCGGAGTC | |
| | | | CACTGGGACCCCCTCCTATCCTAATTCAGGGTCCCT | |
| | | | CTATCCCAGACCTGCTTTTCCCTAA | |
| AB064604.1 | BAB79344.1 | ORF3 | ATGAGTATTTGGAGGCCTCCACTGCACAATGTCCCG | 672 |
| | | | GGACTCGAACACCTCTGGTACGAGTCAGTGCATCGT | |
| | | | AGCCATGCTGCTGTTTGTGGCTGTGGGGATCCTGTA | |
| | | | CGCCATCTTACTGCTCTTGCTGAAAGATATGGCATT | |
| | | | CCGGGAGGGTCGCGGTCTTCTGGGGCACCGGGAG | |
| | | | TAGGGGGCAACCACAACCCTCCCCAGATCCGTCGA | |
| | | | GCCCGCCACCCGGCGGCTGCTCCGGACCCCCCAG | |
| | | | CAGGTAACCAGCCTCCGGCCCTGCCATGGCATGGG | |
| | | | GATGGTGGAAACGAAAGCGGCGCTGGTGGTGGAGA | |
| | | | AAGCGGTGGACCCGTGGCCGACTTCGCAGACGATG | |
| | | | GCCTAGACGATCTCGTCGCCGCCCTCGACGAAGAA | |
| | | | GAATTGTTAAAGACCCCTGCACCCAGCCCACCTTTG | |
| | | | AAATACCCGGTGGCGGTAACATCCCTCGCAGAATAC | |
| | | | AAGTCATCAATCCGAAAGTCCTCGGACCCAGCTACA | |
| | | | GTTTCAGATCCTTTGACCTCAGACGTGACATGTTTAG | |
| | | | CGGCTCGAGTCTTAAAAGAGTCTCAGAACAACAAGA | |
| | | | GACTTCTGAGTTTTTATTCTCCGGCGGCAAACGCCC | |
| | | | CAGGATCGACCTTCCCAAGTACGTCCCGCCAGAAG | |
| | | | AAGACTTCAATATCCAAGAGAGACAACAAAGAGAAC | |
| | | | AGAGACCGTGGACGAGCGAAAGCGAGAGCGAAGCA | |
| | | | GAAGCCCAAGAAGAGACGCAGGCGGGCTCGGTCC | |
| | | | GAGAGCAGCTCCAGCAGCAGCTCCAAGAGCAGTTT | |
| | | | CAACTCCGAAGAGGGCTCAAGTGCCTCTTCGAGCA | |
| | | | GTTAG | |
| AB064606.1 | BAB79352.1 | ORF3 | ATGAGCTTCTGGAGACCTCCGGTGCACAATGCCAC | 673 |
| | | | GGGGATCCAGCGCCTGTGGTACGAGTCCTTTCACC | |
| | | | GTGGCCATGCTGCTTTTTGTGGTTGTGGGGATCCTA | |
| | | | TACTTCACATTACTGCACTTGCTGAGACATATGGCCA | |
| | | | TCCAACAGGCCCGAGACCTTCTGGGCCACCGCGAG | |
| | | | TAGACCCCGATCCCCAGATCCGTAGAGCCAGGCCT | |
| | | | GCCCCGGCCGCTCCGGAGCCCTCACAGGTTGAGCC | |
| | | | GAGACCTGCCCTGCCATGGCATGGGGATGGTGGAA | |
| | | | GCGACGGCGGCGCTGGTGGTTCCGGAAGCGGTGG | |
| | | | ACCCGTGGCAGACTTCGCAGACGATGGCCTCGATC | |
| | | | AGCTCGTCGCCGCCCTAGACGACGAAGAATTGTACA | |
| | | | AGATCCCTGCACACAGTCCACCTATGACATCCCCGG | |
| | | | CACCGGTAACTTGCCTCGCAGAATACAAGTCATTGA | |
| | | | CCCGAAAGTCCTCGGTCCCCACTACTCATTCCACCG | |
| | | | CTGGGACTTCAGGCGTGGCCTCTTTGGCCAACAAG | |
| | | | CTATTAAGAGAGTGTCAGAACAACCAACAACTTCTG | |
| | | | AGTTTTTATTCTCAGGTCCAAAGAGACCCAGAATCG | |
| | | | ATCAAGGGCCTTACATCCCGCCAGAAAAAGGCTCAG | |
| | | | ATTCACTCCAAAGAGAATCGAGACCGTGGAGCAACT | |
| | | | CGGAGACCGAGGCAGAGACAGAAGCCCCCTCGGAA | |
| | | | GAAGAGCCGGAGAACCAAGAAGAACAAGTACTCCA | |
| | | | GTTGCAGCTCCGACAGCAGCTCCGAGAACAGCGAA | |
| | | | AACTCAGACAGGGAATCCAGTGCCTCTTCGAGCAAC | |
| | | | TGA | |
| FJ426280.1 | ACK44073.1 | ORF3 | ATGCTATCCAGAGAGTGTCACAAAAACCGGAAGATG | 674 |
| | | | CTCTCCGCTTTACAAACCCTTTCAAGAGACCCAGAT | |
| | | | ATCTTCCCCCGACAGACGGAGAAGACTACCGACAA | |
| | | | GAAGAAGACTTCGCTTTACAGGAAAGAAGACGGCG | |
| | | | CACATCCACAGAAGAAGTCCAGGACGAGGAGAGCC | |
| | | | CCCCGCAAAACGCGCCGCTCCTACAGCAGCAGCAG | |
| | | | CAGCAGCGGGAGCTCTCAGTCCAGCACGCGGAGCA | |
| | | | GCAGCGACTCGGAGTCCAACTCCGATACATCCTCCA | |
| | | | AGAAGTCCTCAAAACGCAAGCGGGTCTCCACCTAA | |
| AB050448.1 | BAB19925.1 | ORF4 | ATGAGCTTTGTAGAACCCTTACTAACCAGCACCCAC | 675 |
| | | | AGAGAGATAGCATACTACCATGGCTGTGTTCAGATG | |
| | | | CACAAAGCCTTCTGTGGGTGTGACAACTTTCTTACC | |
| | | | CACCTGCAACGCATAACAACATACATCTCTGCTAAC | |
| | | | CAACACACTCCACCCAGCACACCCTCAAACACCCTC | |
| | | | CGTAGAGCCCGGGCCCTGCCCGCGGCTCCGGAGC | |
| | | | CAGCTCCATGGCGTGGACCTGGTGGTGGCAGAGGA | |
| | | | GGCGCCGAAGGTGGCCGTGGAGAAGGAGAAGGTG | |
| | | | GAGAAGACTACGCACAAGAAGACCTAGACGCCTTGT | |
| | | | TCGACGCCGTCGCAAGAGATACAGAGCCTCCAAGA | |
| | | | GCAAGAAAGAGACTACAGTTCGCAGGAGGAGAAAG | |
| | | | AACAGTCCTCCTCAGAAGAAGAGACGGACCCGAAG | |
| | | | AAAAAAGAGCAAAAACAGCAGCAGCGACTCCACCTC | |
| | | | CAGTTCCAAGAGCAGCAGCGACTCGGAAACCAACT | |
| | | | CCGACTCATCTTCCGAGAGCTACAGAAAACCCAAGC | |
| | | | GGGTCTCCACTTAAATCCTATGTTATCAAACCGGCT | |
| | | | GTAAATAAAGTTTACCTTTTTCCTCCCGAGGGGCCTA | |
| | | | AACCCATCTCTGGCTACAGAGCATGGGAAGACGAAT | |
| | | | TTACCACCTGTAAGTACTGGGACAGGCCTAGTAGAA | |
| | | | TTAACCACACAGACCCCCCCTTTTACCCCTGGATGC | |
| | | | CTAAATACAATGTAACCTTCAAACTTGGCTGGAAATAA | |
| AB060596.1 | BAB69913.1 | ORF4 | ATGAGCTGGTGTACTCCAGTTGAAAATGCCTATAAG | 676 |
| | | | AGAGAGATCCACTTTCTCAGGGGCTGTCAACTGCTT | |
| | | | CACACTAGCTTTTGTGGTTGCGATGATTTTATTAATC | |
| | | | ATATTATTCGCCTACAAAATCTTCACGGCAACCTACA | |
| | | | CCAGCCCACGGGACCGTCCACACCTCCAGTGACCC | |
| | | | GTAGAGCTCTGGCCTTGCCGGCTGCTCCGGAGTCA | |
| | | | TGGCGTTCCGGTGGTGGTGGTGGAGACGCCGCCC | |
| | | | GCAGCGACGATGGACCCGGCGCCGATGGAGGAGA | |
| | | | CTACGAACCCGCCGACCTAGACGCACTGTACGACG | |
| | | | CCGTCGCCGCAGACCAAGAACACACAGTCAGAGCC | |
| | | | AGAAAAAGACTTCGGTTTCACACCGGAGAGCCAAGA | |
| | | | GTTACAGCAAGAAGACTTACGAGCACCCCAAGAAGA | |
| | | | AAGCCAAGAGGTACAGCAGCAGCGACTGCTCCAGC | |
| | | | TCAGACTCTCACAGCAGTTCAGACTCAGACAGCAGC | |
| | | | TCCAGCACCTGTTCGTACAAGTCCTCAAAACCCAAG | |
| | | | CAGGTCTCCACATAAACCCATTATTTTTAAACCATGC | |
| | | | ATAAATCAGGTCTTTATGTTTCCACCAGACACCCCCA | |
| | | | GACCTATTATAACTAAAGAAGGCTGGGAGGATGAGT | |
| | | | TTGTCACCTGCAAACACTGGGATAGGCCAGCTAGAT | |
| | | | CATACTACACAGACACACCTACTTACCCTTGGATGC | |
| | | | CCAAGGCACCCCCTCAATGCAATGTAAGCTTTAAAC | |
| | | | TTGGCTTTAAATAA | |
| AB060592.1 | BAB69897.1 | ORF4 | ATGAGCTTTGTAGAACCGTTACTAAGCAGCACCCAC | 677 |
| | | | CGAGAGATAGCATTCTACCATGGCTGTGTTCAAATG | |
| | | | CACAAGGCCTTCTGTGGCTGTGACAACTTTCTTACC | |
| | | | CACCTGCAGCGCATAACAACATACATCTCTGCTAAT | |
| | | | CAACACACTCCACCCAGCACACCCTCAAACACCCTC | |
| | | | CGTAGAGCCCGGGCCCTGCCCGCGGCTCCGGAGC | |
| | | | CAGCTCCATGGCGTGGACCTGGTGGTGGCAGAGGA | |
| | | | GGCGCCGAAGGTGGCCGTGGAGAAGGAGAAGGTG | |
| | | | GAGAAGACTACGCACCAGAAGACCTAGACGACTTGT | |
| | | | TCGCCGCCGTCGCAAGAGATACAGAGCCTCCAAGA | |
| | | | GCAAGAAAGAGACTACAGTTCGCAGGAGGAAAAAG | |
| | | | ACCAGTCCTCCTCAGAAGAAGAGAAGGACCCGAAG | |
| | | | AAAAAAGAGCAAAAACAGCAGCAGCGACTCCACCTC | |
| | | | CAGTTCCAAGAGCAGCAGCGACTCGGAAACCAACT | |
| | | | CCGACTCATCTTCCGAGAGCTACAGAAAACCCAAGC | |
| | | | GGGTCTCCACATAAATCCTATGTTATCAAACCGGCT | |
| | | | ATAAATAAAGTTTACCTTTTTCCTCCCGAGGGGCCTA | |
| | | | AACCCATCTCTGGCTACAGAGCATGGGAAGATGAGT | |
| | | | TCACCTGCTGTAAGTACTGGGACAGGCCTAGTAGAA | |
| | | | TTAACCACACAGACCCCCCCTTCTACCCCTGGATGC | |
| | | | CTAAGTACAATGTAACCTTTAAACTTGGCTGGAAATAA | |
| AB060593.1 | BAB69901.1 | ORF4 | ATGAGTCTGTGGCGACCCCCGGTCCACAATGCCCC | 678 |
| | | | CGGCAGAGAGAGACTTTGGTTTCAGGCCTGTTACGA | |
| | | | ATCTCACAGTGCTTTTTGTGGCTGTGGTAGCTTTATT | |
| | | | CTTCATCTTACTAGCTTGGCTGCACGTTTTAATTTTC | |
| | | | AGGCCGGGCCACCGCCTCCCGGGGGTCCCCGGGC | |
| | | | GGAGACCCCGCCGATTCTGAGGGCGCTGCCGGCAC | |
| | | | CCCAGCCGCGCCGCCACCGCCAGACGGAGAACCC | |
| | | | CGGGTCTGAGCCATGGCCTGGAGATGGTGGTGGAG | |
| | | | ACGGCGCTGGAAGCCAAGAAGGCGGCCAGCGTGG | |
| | | | ACCAAGTACCGCAGACGCAGGTGGAGACGACTTCG | |
| | | | ACCCCGCAGACCTAGAAGACTTGCTCGCGGCCGTC | |
| | | | GAAGAAGACGAACATCGAGCTCCGAGAAAGAGCAG | |
| | | | AAGCCGAAGAAGACTCAGGTTCGGAAAAAGCGTCG | |
| | | | TTCACCTCGTCGCAAGAGAGAGAAGCCGAAGCCCA | |
| | | | AGAAAAGTTACCGATACAGCTCCAGCTCAGACAGCA | |
| | | | GCTCAGACAACAACAGCAGCTCCGAGTCCACTTGCA | |
| | | | GCAAGTCTTCCTCCAACTCCAAAAAACGAAGGCACA | |
| | | | TTTACATATAAACCCACTATTTTTGGCCCAAGGGAAC | |
| | | | ATGTAAACATGTTCGGTGAGTACCCAGATAGGAAGC | |
| | | | CCACTAAGGAAGATTGGCAGACCGAGTATGAGACCT | |
| | | | GCAGAGCCTTTGATAGACCCCCTAGAACCTTACTCA | |
| | | | CAGATCCCCCTTTCTACCCCTGGATGCCTAAACAAC | |
| | | | CCCCCACCTATCGTGTATCCTTCAAACTTGGCTTTCA | |
| | | | ATAA | |
| AB060595.1 | BAB69909.1 | ORF4 | ATGAATCTCTGGCGACCCCCTCTGAGAAATATCCCC | 679 |
| | | | CACAGGGAGAGATGTTGGCTTGAGGCCTGTCTCAG | |
| | | | AGCCCACGATTCTTTTTGTGGCTGTCCTAGTCCTATT | |
| | | | GTTCATTTTTCTAGTCTGGTTGCACGTTTTAATCTAC | |
| | | | AAGGAGGCCCGCCGCCAGAGGATGACTCCCCACAG | |
| | | | GGCGCGCCAGTCCTGAGGGCCCTGCCGGCACCGA | |
| | | | GCCCCCACAGGCACACCCGCACGGAGAACCCCTCC | |
| | | | GGTGAGCCATGGCCTACTCCTACTGGTGGCGCCGC | |
| | | | CGGAGGTGGCCGTGGAGAGGCCGATGGAGGCGCT | |
| | | | GGAGGCGCCGCAGACGAATACCGCGCCGAAGACCT | |
| | | | AGACGACCTGTTCGCCGCTATCGAAGGAGACCAAG | |
| | | | CAGCTCCAAGAAGACCCGCAAGAGCAAGAAAGAGA | |
| | | | CTCCTCTTCTTCGGAAGAAAGTCTCCCTACATCGTC | |
| | | | AGAAGAGACACCGCCAGCCCACCTACTCAGAGTAC | |
| | | | ACCTCAGAAAGCAGCTCCGGCAACAGCGAGACCTC | |
| | | | CGAGTCCAGCTCAGAGCCCTGTTCGCCCAAGTCCT | |
| | | | CAAAACGCAAGCGGGCCTACACATAAACCCCCTCTT | |
| | | | ATTGGCCCCGCAGTAAACAAGGTCTACTTGTTCCCT | |
| | | | GACAGGGCCCCTAAACCTCCACCTAGCTCGGGAGA | |
| | | | CTGGGCCACGGAGTACGCGGCGGCCGCCGCCTTC | |
| | | | GATAGACCCCCCAGAGGCAACCTGTCAGACAACCC | |
| | | | CTTCTATCCCTGGATGCCAACAAACACCAAATTCTCT | |
| | | | GTAACCTTTAAACTGGGGTGGAAACCCTGA | |
| AB064596.1 | BAB79311.1 | ORF4 | ATGCCGTGGAGACCGCCGGCTCATAACGTCCAGGG | 680 |
| | | | GCGAGAGAGCCAGTGGTTCGCGGCTTGTTTTCACG | |
| | | | GCCACGCTTCGTTTTGCGGCTGCGGTGACTTTATTG | |
| | | | GGCATATTAACAGCCTTGCTCCTCGCTTTCCTAACAA | |
| | | | CCAAGGACCCCCGCATCCACCTGCCTTAAACAGGC | |
| | | | CACCTGCACAGGGCCCAGAAAGCCCCGGGGGTTCC | |
| | | | ATACTACCCCTGCCAGCCCTACCGGCACCACCTGAT | |
| | | | CCGCCACCACGGCCTGGTGGTGGGGAAGACGGTG | |
| | | | GCGACGCCGCCCGTGGGGCCGCTGGCGCCGCCGA | |
| | | | AGGCGCGTATGGAGAAGAAGACCTAGAACTGCTGTT | |
| | | | CGCCGCCGCCGAGGAAGACGATATGTCGCCCAAAG | |
| | | | CGCCCAAAGCTCGACACACGTCCCGAAGGACTACC | |
| | | | AGAGGAGCAAAGAGGAGCTTACAATTTACTCCAAGC | |
| | | | CCTCGAAGACTCAGCCCAGTCGGAAGAAAGCGACC | |
| | | | AAGAAGAAATGCCTCCCCTCGAAGAAGAACAAGTAC | |
| | | | TCCACGAGCAAAAGAAAGAGGCGCTCCTCCAGCAG | |
| | | | CTCCAGCAGCAGAAACACCACCAGCGAGTCCTCAA | |
| | | | GCGAGGCCTCAGACTCCTCCTCGGAGACGTCCTGA | |
| | | | AACTCCGCCGGGGTCTACACATAGACCCGGTCCTTA | |
| | | | CATAGCACCCCCTCCATACATCCCTGACCTTCTTTTT | |
| | | | CCCAACACCCAAAAAAAAAAAAAATTTTCCAACTTCG | |
| | | | ATTGGGCTACAGAATACCAGCTTGCTACCGCTTTCG | |
| | | | ACCGCCCTCTCCGCCACTACCCCTTAGACCTCCCGC | |
| | | | ACTACCCGTGGCTACCAAAAAAGCCCAATACCCACT | |
| | | | CTACCTATAGAGTGTCCTTTCAACTAAAAGCCCCCC | |
| | | | AATAA | |
| AB064597.1 | BAB79315.1 | ORF4 | ATGCCGTGGAGACCGCCGGTGCATAGTGTCCAGGG | 681 |
| | | | GCGAGAGGATCAGTGGTTCGCGAGCTTTTTTCACGG | |
| | | | CCACGCTTCATTTTGCGGTTGCGGTGACGCTGTTGG | |
| | | | CCATCTTAATAGCATTGCTCCTCGCTTTCCTCGCGC | |
| | | | CGGTCCACCAAGGCCCCCTCCGGGGCTAGAGCAGC | |
| | | | CTAACCCCCCGCAGCAGGGCCCGGCCGGGCCCGG | |
| | | | AGGGCCGCCCGCCATCTTGGCGCTGCCGGCTCCGC | |
| | | | CCGCGGAGCCTGACGACCCGCAGCCACGGCGTGG | |
| | | | TGGTGGGGACGGTGGCGCCGCCGCTGGCGCCGCA | |
| | | | GGCGACCGTGGAGACCGAGACTACGACGAAGAAGA | |
| | | | GCTAGACGAGCTTTTCCGCGCCGCCGCCGAAGACG | |
| | | | ATTTGTCTCCCATCAAAGCGAAACAAGCTCGACTCG | |
| | | | GCCTTCAGAGGAGAAAACCCAGAGCAAAAAGAATGC | |
| | | | TATTCTCTCCTCAAAGCACTCGAGGAAGAAGAGACC | |
| | | | CCAGAAGAAGAAGAACCAGCACCCCAAGAAAAAGC | |
| | | | CCAGAAAGAGGAGCTACTCCACCAGCTCCAGCTCC | |
| | | | AGAGACGCCACCAGCGAGTCCTCAGACGAGGGCTC | |
| | | | AAGCTCGTCTTTACAGACATCCTCCGACTCCGCCAG | |
| | | | GGAGTCCACTGGAACCCCGAGCTCACATAGAGCCC | |
| | | | CCACCTTACATACCAGACCTACTTTTTCCCAATACTG | |
| | | | GTAAAAAAAAAAAATTCTCTCCCTTCGACTGGGAAAC | |
| | | | GGAGGCCCAGCTAGCAGGGATATTCAAGCGTCCTA | |
| | | | TGCGCTTCTATCCCTCAGACACCCCTCACTACCCGT | |
| | | | GGTTACCCCCCAAGCGCGATATCCCGAAAATATGTA | |
| | | | ACATAAACTTCAAAATAAAGCTGCAAGAGTGA | |
| AB064599.1 | BAB79323.1 | ORF4 | ATGCCGTGGTCTCTGCCGAGACATAATATCAGAACG | 682 |
| | | | AGAGAAGATCTCTGGGTGCAATCGATTCTTTATTCAC | |
| | | | ATGACACTTTTTGTGGCTGTGATAATATTCCTGAGCA | |
| | | | TCTTACTGGCCTCCTGGGCGGCGTACGACCAGCTC | |
| | | | CACCTAGAAACCCAGGACCCCCTACCATACGGAGC | |
| | | | CTGCCGGCACTGCCGCCAGCTCCGGAACCCCCTGA | |
| | | | GGAACCACGGCGTGGTGGAGATACAGACGGAGACC | |
| | | | GTGGAGAAGATGGAGGAGACGCCGCTGGGGCCTAC | |
| | | | GAACCCGAAGACCTAGAAGAACTTTTCGCCGCCGC | |
| | | | CGAGCAAGACGATATGCGTCGTGTCCAAAAAACCCC | |
| | | | GATTCGACACTCCCCACCACGGGCAGCTATCAAACC | |
| | | | AAGAAGAAGACGCCTTGTCTATCCTCAGACAACCCC | |
| | | | AAAAAGAGCAAGAAGAGACCACCTCCGAGGAAGAA | |
| | | | CAAGCACTCCAAAAAGAAGAGGAGCAAAAAGAAAAG | |
| | | | CTCCTACAGCAACTCAGAGTCCAGCGACAGCACCA | |
| | | | GCGAGTCCTCAGACAGGGAATCAAACACCTCATGG | |
| | | | GAGACGTCCTCCGACTCAGACAGGGAGTCCACTGG | |
| | | | AACCCAGTCCTATAATACTTCCACCAGAACCAATACC | |
| | | | AGACCTCTTATTCCCCAATACTGGTAAAAAAAAAAAA | |
| | | | TTCTCTCTCTTCGACTGGGAGTGCGAGAGGGATCTA | |
| | | | GCATGTGCATTCTGCCGTCCCATGCGCTTCTATCCC | |
| | | | TCAGACAACCCAACTTACCCGTGGTTACCCCCCAAG | |
| | | | CGAGATATCCCCAAAATATGTAAAGTAAACTTCAAAA | |
| | | | TAAATTTCACTGAATGA | |
| AB064600.1 | BAB79327.1 | ORF4 | ATGTCGTGGAGACCGCCGAGCCAAAATTTACTGCAA | 683 |
| | | | AGAGAAGAGGCCTGGTACTCAGCTTTTCTTAGCTCG | |
| | | | CATTCTACATTTTGCGGTTGTACTGACCCTCTGCTGC | |
| | | | ATATTACTCTCATTGCTGGCCGCCTTACTAACCCCGT | |
| | | | ACCCGTCACCCGCCAACCGGAGACCCCTCCTAACG | |
| | | | GCCTCAGGGGGCTGCCGGCACTGCCAGCACCCCCT | |
| | | | GAACCACCAGCACCGCCACCACGGCCTGGGGATGG | |
| | | | TACCGGAGAAGAAGATGGCGCCCATGGAGAAGGAG | |
| | | | AAGGTGGGCGATACGCAGAAGAAGACCTAGAAGAA | |
| | | | CTGTTCGCCGCCGCGGCAGAAGACGATATGCGTCG | |
| | | | CATCCAAAAGACCCCGATTCGACACTCCAGTCCAAG | |
| | | | GGCAGCTCGAAAGCCAAGAAGAAGAAAGCTATCGTT | |
| | | | TACTCAGAGCACTCCAAAAAGAGCAAGAGACAAGCA | |
| | | | GCTCGGAAGAGGAGCAGCCACAAAACCAAGAGATC | |
| | | | CAAGAAAAACTACTCCTCCAGCTCCAGCAGCAGCGA | |
| | | | CAACAGCAGCGACTCCTCGCAAAGGGAATCAAGCA | |
| | | | CCTCCTCGGAGATGTCCTCCGACTCCGAAAAGGAGT | |
| | | | CCACTGGGACCCGGTCCTTACATAGCACCTCCAGAA | |
| | | | CCTATCCCAGACCTTTTGTTCCCCAGTACTAAAAAAA | |
| | | | AAAAGAAATTTTCAAAATTAGACTGGGAGAACGAGG | |
| | | | CTCAAATAGCAGGGTGGTTAGACAGGCCTATGAGG | |
| | | | CTGTATCCTGGGGACCCCCCCTTCTACCCTTGGCTA | |
| | | | CCCCGAAAGCCACCTACCCAGCCTACATGTAGGGTA | |
| | | | AGCTTCAAAATAAAGCTAGATGATTAA | |
| AB064601.1 | BAB79331.1 | ORF4 | ATGTCGTGGGCTCCGCCGCTATTCAACTCGAAACAG | 684 |
| | | | AGAGAGGACCAGTGGTACCAGTCAATTATTTTCAGC | |
| | | | CATAATACTTTTTGCGGCTGCGGTGACCTTGTTAGG | |
| | | | CATTTTTGCGTCGTTGCTTCTCGCTTTACTGAGCCTC | |
| | | | CTGTAGTGCCGGCCCTACCGGCACCGGTACCGGCA | |
| | | | CCGCCACGGCGTGGTACAGAAGAAGAAGGTGGAGA | |
| | | | CCGTGGAGAAGACGCCGCAGACCGTGGACCCTACG | |
| | | | CAGAAGAAGAGCTAGAAGATTTGTTCGCCGCCGCC | |
| | | | CGAGAAGACGATATGCGTCGTCTTCAAAAGACCCCG | |
| | | | ACTGGAAACCCAGTACAAAGGAACCCAAGAAACCCC | |
| | | | AGAAGAAGACGCCTACACTTTACTCAAAGCACTCCA | |
| | | | AAAAGAGCAAGAGAGCAGCAGCTCGGAAGAAGAAC | |
| | | | TCCCACAAGAAGAGCAAGAGATCCAAAAAACACAAC | |
| | | | TCCTCAAGCAGCTCCAACTCCAGCAGCAGCAACAGC | |
| | | | GAATCCTCAAGAGGGGAATCAGACACCTCTTCGGAG | |
| | | | ACGTCCTCCGACTCAGAAAAGGAGTCCACTCCAACC | |
| | | | CAGACCTATTATAATACCAGCAGAGGAAATCCCAGA | |
| | | | CCTGCTTTTCCCCAATACTGGTAAAAAAAAAAAATTC | |
| | | | TCTCCATTCGATTGGGAGACAGAGCAGCAGCTCGCA | |
| | | | TGCTGGATGCGGCGCCCCATGCGCTTCTATCCAACA | |
| | | | GACCCCCCGTTCTACCCCTGGCTACCCCCCAAGCG | |
| | | | AGATATCCCCAATATATGTAAAGTCAACTTCAAAATA | |
| | | | AATTACTCAGAGTAA | |
| AB064602.1 | BAB79335.1 | ORF4 | ATGCCGTGGCATCCACCGGGCTACAACGTTCAACA | 685 |
| | | | GAGAGAAGAGCTCTGGGTACAGACAGTTACTACTTC | |
| | | | ACATGCTACTTTTTGCGGCTGTGGTGACCCTAGTAG | |
| | | | CCATCTTCACCGCATTCTTAGCCGCCTTAATAACAG | |
| | | | CAGCCGGCGGCCCCCCGAAACCCCAAACCCCATTC | |
| | | | GTGCCCTACCGGCCCTACCGGCACCCCAAGAACCT | |
| | | | GAACAGCCGCCATCACGGCCTGGTACCGGTACAGA | |
| | | | AGAAGGCCATGGCGCCGAAGGAGGCGACCGAGGT | |
| | | | GGGGCCTACGCAGAAGAAGATTTAGAAGATCTTTTC | |
| | | | GCGGCCGCGGAAGAAGACGATATGCGTCGTGTCAA | |
| | | | AAAGACCCCGATTGGAAACCCAGTACCACGGCCAA | |
| | | | CACGAAAGCCAAGAAGAAGACGCCTATCTTTTACTC | |
| | | | AAACAACTCCAGGAAGAGCAAGAAACGAGCAGTTCG | |
| | | | GAGGGAGAACAAGCACCCCAAGAAAAAACACTCCAA | |
| | | | AAAGAAAAGCTCCTCAAGCAGCTGCAGCTCCACAAG | |
| | | | CAGCAGCAGCAACTCCTCAGAAAAGGAATCAGACAC | |
| | | | CTCCTCGGGGACGTCCTCCGACTCAGACGGGGAGT | |
| | | | CCACTGGGACCCAGGCCTATAGTACTGCCTCCAGA | |
| | | | GCCTATTCCAGACTTGCTTTTCCCAAATACTAAAAAA | |
| | | | AAAAAGAAATTTTCGCCCTTAGACTGGGAGAACGAG | |
| | | | GCTCAAATAGCAGGGTGGTTAGACAGGCCTATGAG | |
| | | | GCTGTATCCTGGGGACAACCCCTTCTACCCGTGGCT | |
| | | | ACCAAAAAAGCCACCTACCCACCCTACATGTAGAGT | |
| | | | AACCTTCAAAATAAAGCTAGATGATTAA | |
| AB064603.1 | BAB79339.1 | ORF4 | ATGTCGTGGCGACCGCCGTTGCATTCTATCCAAGGC | 686 |
| | | | AGAGAAGATCAATGGTATGCAGGCATCTTTCATACG | |
| | | | CATTTTGCTTTTTGCGGTTGTGGTGACCCTGTTGGG | |
| | | | CGTATTAACCGCATTGCTCACCGCTTTCCTAACGCC | |
| | | | GGTCCCCCGAGACCACCTCCAGGGCTAGACCAGCC | |
| | | | CAACCTCGGAGGGCCGGAAGGTCCAGGAGGTGCC | |
| | | | CCTAGAGCCCTGCCAGCCCTGCCGGCCCCGGCAGA | |
| | | | GCCAGAGCCGGCACCACGGCGTGGTGGTGGGGCC | |
| | | | GATGGAGACAGCGCCGCTGGGGCCGCCGCCGCCG | |
| | | | CAGACCATGGAGGGTACGACGAAGGAGACCTAGAA | |
| | | | GATCTTTTCGCCGCCGCCGCCGAGGACGATATGGC | |
| | | | CTTTATCAAGAAAAAGAAACAAGCTCGACACAAAGAT | |
| | | | GCCAGGCCCCCCAACCCCCGAAAAAGAAAGCTACA | |
| | | | CTTTACTCCAAGCCCTCCAAGAGTCGGGCCAGGAG | |
| | | | AGCAGCTCCCAGGACGAAGAACAAGCACCCCAAAA | |
| | | | AGAAGAGAACCAGAAAGAAGCGCTCGTGGAGCAGC | |
| | | | TCCAGCTCCAGAAACAGCACCAGCGAGTCCTCAAG | |
| | | | CGAGGCCTCAAACTCCTCTTGGGAGACGTCCTCCG | |
| | | | ACTCCGCCGCGGAGTCCACTGGGACCCCCTCCTAT | |
| | | | CCTAATTCAGGGTCCCTCTATCCCAGACCTGCTTTT | |
| | | | CCCTAACACTCAAAAAAAACCCAAATTTTCCAACTTC | |
| | | | GACTGGGCCACCGAGTACCAAATAGCCAAGTGGCC | |
| | | | AGACCGCCCTTTGAGGCACTACCCCTCAGACCTCCC | |
| | | | TCACTACCCGTGGCTACCAAAAAAGCCACCTACCCA | |
| | | | GCCTACATGTAGAGTAAGTTTCAAATTAAAGCTTGAT | |
| | | | GCCTAA | |
| AB064604.1 | BAB79343.1 | ORF4 | ATGAGTATTTGGAGGCCTCCACTGCACAATGTCCCG | 687 |
| | | | GGACTCGAACACCTCTGGTACGAGTCAGTGCATCGT | |
| | | | AGCCATGCTGCTGTTTGTGGCTGTGGGGATCCTGTA | |
| | | | CGCCATCTTACTGCTCTTGCTGAAAGATATGGCATT | |
| | | | CCGGGAGGGTCGCGGTCTTCTGGGGCACCGGGAG | |
| | | | TAGGGGGCAACCACAACCCTCCCCAGATCCGTCGA | |
| | | | GCCCGCCACCCGGCGGCTGCTCCGGACCCCCCAG | |
| | | | CAGGTAACCAGCCTCCGGCCCTGCCATGGCATGGG | |
| | | | GATGGTGGAAACGAAAGCGGCGCTGGTGGTGGAGA | |
| | | | AAGCGGTGGACCCGTGGCCGACTTCGCAGACGATG | |
| | | | GCCTAGACGATCTCGTCGCCGCCCTCGACGAAGAA | |
| | | | GAAAGAAGACTTCAATATCCAAGAGAGACAACAAAG | |
| | | | AGAACAGAGACCGTGGACGAGCGAAAGCGAGAGCG | |
| | | | AAGCAGAAGCCCAAGAAGAGACGCAGGCGGGCTCG | |
| | | | GTCCGAGAGCAGCTCCAGCAGCAGCTCCAAGAGCA | |
| | | | GTTTCAACTCCGAAGAGGGCTCAAGTGCCTCTTCGA | |
| | | | GCAGTTAGTCAGAACCCAACAGGGAGTCCACGTAG | |
| | | | ATCCCTGCCTCGTGTAGGCCCGGAGCAGTGGCTAC | |
| | | | TCCCCGAGAGAAAGCCTAAGCCCGCTCCTACTTCAG | |
| | | | GAGACTGGGCTATGGAGTACCTAATGTGCAAAATAA | |
| | | | TGAATAGGCCTCCTCGCTCTCAGCTTACTGACCCCC | |
| | | | CATTTTACCCTTACTGCAAAAATAATTACAATGTAAC | |
| | | | CTTTCAGCTTAACTACAAATAA | |
| AB064606.1 | BAB79351.1 | ORF4 | ATGAGCTTCTGGAGACCTCCGGTGCACAATGCCAC | 688 |
| | | | GGGGATCCAGCGCCTGTGGTACGAGTCCTTTCACC | |
| | | | GTGGCCATGCTGCTTTTTGTGGTTGTGGGGATCCTA | |
| | | | TACTTCACATTACTGCACTTGCTGAGACATATGGCCA | |
| | | | TCCAACAGGCCCGAGACCTTCTGGGCCACCGCGAG | |
| | | | TAGACCCCGATCCCCAGATCCGTAGAGCCAGGCCT | |
| | | | GCCCCGGCCGCTCCGGAGCCCTCACAGGTTGAGCC | |
| | | | GAGACCTGCCCTGCCATGGCATGGGGATGGTGGAA | |
| | | | GCGACGGCGGCGCTGGTGGTTCCGGAAGCGGTGG | |
| | | | ACCCGTGGCAGACTTCGCAGACGATGGCCTCGATC | |
| | | | AGCTCGTCGCCGCCCTAGACGACGAAGAAAAAAGG | |
| | | | CTCAGATTCACTCCAAAGAGAATCGAGACCGTGGAG | |
| | | | CAACTCGGAGACCGAGGCAGAGACAGAAGCCCCCT | |
| | | | CGGAAGAAGAGCCGGAGAACCAAGAAGAACAAGTA | |
| | | | CTCCAGTTGCAGCTCCGACAGCAGCTCCGAGAACA | |
| | | | GCGAAAACTCAGACAGGGAATCCAGTGCCTCTTCGA | |
| | | | GCAACTGATAACAACCCAACAGGGGGTTCACAAAAA | |
| | | | CCCATTGCTAGAGTAGGCCCAGAGCAGTGGCTGTTT | |
| | | | CCCGAGAGAAAGCCAAAACCACCTCCCACCGCCCA | |
| | | | GGACTGGGCGGAGGAGTACACTGCCTGTAAATACT | |
| | | | GGGGTAGGCCACCTCGCAAATTCCTCACAGACACG | |
| | | | CCATTCTATACTCACTGCAAGACCAATTACAATGTAA | |
| | | | CCTTTATGCTTAACTATCAATAA | |
| FJ426280.1 | ACK44074.1 | ORF4 | ATGGGACTGGCGACGGGGGCTTTTTGGTGCAGATG | 689 |
| | | | CTATCCAGAGAGTGTCACAAAAACCGGAAGATGCTC | |
| | | | TCCGCTTTACAAACCCTTTCAAGAGACCCAGATATCT | |
| | | | TCCCCCGACAGACGGAGAAGACTACCGACAAGAAG | |
| | | | AAGACTTCGCTTTACAGGAAAGAAGACGGCGCACAT | |
| | | | CCACAGAAGAAGTCCAGGACGAGGAGAGCCCCCCG | |
| | | | CAAAACGCGCCGCTCCTACAGCAGCAGCAGCAGCA | |
| | | | GCGGGAGCTCTCAGTCCAGCACGCGGAGCAGCAGC | |
| | | | GACTCGGAGTCCAACTCCGATACATCCTCCAAGAAG | |
| | | | TCCTCAAAACGCAAGCGGGTCTCCACCTAAACCCCC | |
| | | | TATTATTAGGCCCGCCACAAACAAGGTGTATATCTTT | |
| | | | GAGCCCCCCAGAGGCCTACTCCCCATAGTGGGAAA | |
| | | | AGAAGCCTGGGAGGACGAGTACTGCACCTGCAAGT | |
| | | | ACTGGGATCGCCCTCCCAGAACCAACCACCTAGACA | |
| | | | CCCCCACTTATCCCTAG | |

[0471] In some embodiments, the genetic element may comprise one or more sequences or a fragment of a sequence from a substantially non-pathogenic virus having at least about 60%, 70% 80%, 85%, 90% 95%, 96%, 97%, 98% and 99% nucleotide sequence identity to any one of the nucleotide sequences described herein, e.g., Table 20.

TABLE 20
Examples of Anelloviruses and their sequences.
Accessions numbers and related sequence information
may be obtained at www.ncbi.nlm.nih.gov/genbank/,
as referenced on Jun. 12, 2017.

| Accession # | Description |
|---|---|
| AB026345.1 | TT virus genes for ORF1 and ORF2, complete cds, isolate: |
| | TRM1 |
| AB026346.1 | TT virus genes for ORF1 and ORF2, complete cds, isolate: |
| | TK16 |
| AB026347.1 | TT virus genes for ORF1 and ORF2, complete cds, isolate: |
| | TP1-3 |
| AB030487.1 | TT virus gene for pORF2a, pORF2b, pORF1, complete cds, |
| | clone: JaCHCTC19 |
| AB030488.1 | TT virus gene for pORF2a, pORF2b, pORF1, complete cds, |
| | clone: JaBD89 |
| AB030489.1 | TT virus gene for pORF2a, pORF2b, pORF1, complete cds, |
| | clone: JaBD89 |
| AB038340.1 | TT virus genes for ORF2s, ORF1, ORF3, complete cds |
| AB038622.1 | TT virus genes for ORF2, ORF1, ORF3, complete cds, |
| | isolate: TTVyon-LC011 |
| AB038623.1 | TT virus genes for ORF2, ORF1, ORF3, complete cds, |
| | isolate: TTVyon-KC186 |
| AB038624.1 | TT virus genes for ORF2, ORF1, ORF3, complete cds, |
| | isolate: TTVyon-KC197 |
| AB041821.1 | TT virus mRNA for VP1, complete cds |
| AB050448.1 | Torque teno virus genes for ORF1, ORF2, ORF3, ORF4, |
| | complete cds, isolate: TYM9 |
| AB060592.1 | Torque teno virus gene for ORF1, ORF2, ORF3, ORF4, |
| | clone: SAa-39 |
| AB060593.1 | Torque teno virus gene for ORF1, ORF2, ORF3, ORF4, |
| | complete cds, clone: SAa-38 |
| AB060595.1 | TT virus gene for ORF1, ORF2, ORF3, ORF4, complete |
| | cds, clone: SAj-30 |
| AB060596.1 | TT virus gene for ORF1, ORF2, ORF3, ORF4, complete |
| | cds, clone: SAf-09 |
| AB064596.1 | Torque teno virus DNA, complete genome, isolate: CT25F |
| AB064597.1 | Torque teno virus DNA, complete genome, isolate: CT30F |
| AB064599.1 | Torque teno virus DNA, complete genome, isolate: JT03F |
| AB064600.1 | Torque teno virus DNA, complete genome, isolate: JT05F |
| AB064601.1 | Torque teno virus DNA, complete genome, isolate: JT14F |
| AB064602.1 | Torque teno virus DNA, complete genome, isolate: JT19F |
| AB064603.1 | Torque teno virus DNA, complete genome, isolate: JT41F |
| AB064604.1 | Torque teno virus DNA, complete genome, isolate: CT39F |
| AB064606.1 | Torque teno virus DNA, complete genome, isolate: JT33F |
| AF079173.1 | TT virus strain TTVCHN1, complete genome |
| AF116842.1 | TT virus strain BDH1, complete genome |
| AF122917.1 | TT virus isolate JA4, complete genome |
| AF122919.1 | TT virus isolate JA10 unknown genes |
| AF129887.1 | TT virus TTVCHN2, complete genome |
| AF254410.1 | TT virus ORF2 protein and ORF1 protein genes, |
| | complete cds |
| AF298585.1 | TT virus Polish isolate P/1C1, complete genome |
| AF315076.1 | TTV-like virus DXL1 unknown genes |
| AF315077.1 | TTV-like virus DXL2 unknown genes |
| AF345521.1 | TT virus isolate TCHN-G1 Orf2 and Orf1 genes, |
| | complete cds |
| AF345522.1 | TT virus isolate TCHN-E Orf2 and Orf1 genes, |
| | complete cds |
| AF345525.1 | TT virus isolate TCHN-D2 Orf2 and Orf1 genes, |
| | complete cds |
| AF345527.1 | TT virus isolate TCHN-C2 Orf2 and Orf1 genes, |
| | complete cds |
| AF345528.1 | TT virus isolate TCHN-F Orf2 and Orf1 genes, |
| | complete cds |
| AF345529.1 | TT virus isolate TCHN-G2 Orf2 and Orf1 genes, |
| | complete cds |
| AF371370.1 | TT virus ORF1, ORF3, and ORF2 genes, complete cds |
| AJ620212.1 | Torgue teno virus, isolate tth6, complete genome |
| AJ620213.1 | Torgue teno virus, isolate tth10, complete genome |
| AJ620214.1 | Torgue teno virus, isolate tth11g2, complete genome |
| AJ620215.1 | Torgue teno virus, isolate tth18, complete genome |
| AJ620216.1 | Torgue teno virus, isolate tth20, complete genome |
| AJ620217.1 | Torgue teno virus, isolate tth21, complete genome |
| AJ620218.1 | Torgue teno virus, isolate tth3, complete genome |
| AJ620219.1 | Torgue teno virus, isolate tth9, complete genome |
| AJ620220.1 | Torgue teno virus, isolate tth16, complete genome |
| AJ620221.1 | Torgue teno virus, isolate tth17, complete genome |
| AJ620222.1 | Torgue teno virus, isolate tth25, complete genome |
| AJ620223.1 | Torgue teno virus, isolate tth26, complete genome |
| AJ620224.1 | Torgue teno virus, isolate tth27, complete genome |
| AJ620225.1 | Torgue teno virus, isolate tth31, complete genome |
| AJ620226.1 | Torgue teno virus, isolate tth4, complete genome |
| AJ620227.1 | Torgue teno virus, isolate tth5, complete genome |
| AJ620228.1 | Torgue teno virus, isolate tth14, complete genome |
| AJ620229.1 | Torgue teno virus, isolate tth29, complete genome |
| AJ620230.1 | Torgue teno virus, isolate tth7, complete genome |
| AJ620231.1 | Torgue teno virus, isolate tth8, complete genome |
| AJ620232.1 | Torgue teno virus, isolate tth13, complete genome |
| AJ620233.1 | Torgue teno virus, isolate tth19, complete genome |
| AJ620234.1 | Torgue teno virus, isolate tth22g4, complete genome |
| AJ620235.1 | Torgue teno virus, isolate tth23, complete genome |
| AM711976.1 | TT virus sle1957 complete genome |
| AM712003.1 | TT virus sle1931 complete genome |
| AM712004.1 | TT virus sle1932 complete genome |
| AM712030.1 | TT virus sle2057 complete genome |
| AM712031.1 | TT virus sle2058 complete genome |
| AM712032.1 | TT virus sle2072 complete genome |
| AM712033.1 | TT virus sle2061 complete genome |
| AM712034.1 | TT virus sle2065 complete genome |
| AY026465.1 | TT virus isolate L01 ORF2 and ORF1 genes, complete cds |
| AY026466.1 | TT virus isolate L02 ORF2 and ORF1 genes, complete cds |
| DQ003341.1 | Torque teno virus clone P2-9-02 ORF2 (ORF2), ORF1A |
| | (ORF1A), and ORF1B (ORF1B) genes, complete cds |
| DQ003342.1 | Torque teno virus clone P2-9-07 ORF2 (ORF2), ORF1A |
| | (ORF1A), and ORF1B (ORF1B) genes, complete cds |
| DQ003343.1 | Torque teno virus clone P2-9-08 ORF2 (ORF2), ORF1A |
| | (ORF1A), and ORF1B (ORF1B) genes, complete cds |
| DQ003344.1 | Torque teno virus clone P2-9-16 ORF2 (ORF2), ORF1A |
| | (ORF1A), and ORF1B (ORF1B) genes, complete cds |
| DQ186994.1 | Torque teno virus clone P601 ORF2 (ORF2) and ORF1 |
| | (ORF1) genes, complete cds |
| DQ186995.1 | Torque teno virus clone P605 ORF2 (ORF2) and ORF1 |
| | (ORF1) genes, complete cds |
| DQ186996.1 | Torque teno virus clone BM1A-02 ORF2 (ORF2) and |
| | ORF1 (ORF1) genes, complete cds |
| DQ186997.1 | Torque teno virus clone BM1A-09 ORF2 (ORF2) and |
| | ORF1 (ORF1) genes, complete cds |
| DQ186998.1 | Torque teno virus clone BM1A-13 ORF2 (ORF2) and |
| | ORF1 (ORF1) genes, complete cds |
| DQ186999.1 | Torque teno virus clone BM1B-05 ORF2 (ORF2) and |
| | ORF1 (ORF1) genes, complete cds |
| DQ187000.1 | Torque teno virus clone BM1B-07 ORF2 (ORF2) and |
| | ORF1 (ORF1) genes, complete cds |
| DQ187001.1 | Torque teno virus clone BM1B-11 ORF2 (ORF2) and |
| | ORF1 (ORF1) genes, complete cds |
| DQ187002.1 | Torque teno virus clone BM1 B-14 ORF2 (ORF2) and |
| | ORF1 (ORF1) genes, complete cds |
| DQ187003.1 | Torque teno virus clone BM1B-08 ORF2 (ORF2) gene, |
| | complete cds; and nonfunctional ORF1 (ORF1) gene, |
| | complete sequence |
| DQ187004.1 | Torque teno virus clone BM1C-16 ORF2 (ORF2) and |
| | ORF1 (ORF1) genes, complete cds |
| DQ187005.1 | Torque teno virus clone BM1C-10 ORF2 (ORF2) and |
| | ORF1 (ORF1) genes, complete cds |
| DQ187007.1 | Torque teno virus clone BM2C-25 ORF2 (ORF2) gene, |
| | complete cds; and nonfunctional ORF1 (ORF1) gene, |
| | complete sequence |
| DQ361268.1 | Torque teno virus isolate ViPi04 ORF1 gene, |
| | complete cds |
| EF538879.1 | Torque teno virus isolate CSC5 ORF2 and ORF1 |
| | genes, complete cds |
| EU305675.1 | Torque teno virus isolate LTT7 ORF1 gene, complete |
| | cds |
| EU305676.1 | Torque teno virus isolate LTT10 ORF1 gene, complete |
| | cds |
| EU889253.1 | Torque teno virus isolate ViPiO8 nonfunctional ORF1 |
| | gene, complete sequence |
| FJ392105.1 | Torque teno virus isolate TW53A25 ORF2 gene, partial |
| | cds; and ORF1 gene, complete cds |
| FJ392107.1 | Torque teno virus isolate TW53A27 ORF2 gene, partial |
| | cds; and ORF1 gene, complete cds |
| FJ392108.1 | Torque teno virus isolate TW53A29 ORF2 gene, partial |
| | cds; and ORF1 gene, complete cds |
| FJ392111.1 | Torque teno virus isolate TW53A35 ORF2 gene, partial |
| | cds; and ORF1 gene, complete cds |
| FJ392112.1 | Torque teno virus isolate TW53A39 ORF2 gene, partial |
| | cds; and ORF1 gene, complete cds |
| FJ392113.1 | Torque teno virus isolate TW53A26 ORF2 gene, complete |
| | cds; and nonfunctional ORF1 gene, complete sequence |
| FJ392114.1 | Torque teno virus isolate TW53A30 ORF2 and ORF1 |
| | genes, complete cds |
| FJ392115.1 | Torque teno virus isolate TW53A31 ORF2 and ORF1 |
| | genes, complete cds |
| FJ392117.1 | Torque teno virus isolate TW53A37 ORF1 gene, complete |
| | cds |
| FJ426280.1 | Torque teno virus strain SIA109, complete genome |
| GU797360.1 | Torque teno virus clone 8-17, complete genome |
| HC742700.1 | Sequence 7 from Patent WO2010044889 |
| HC742710.1 | Sequence 17 from Patent WO2010044889 |

[0472] In some embodiments, the genetic element comprises one or more sequences with homology or identity to one or more sequences from one or more non-anelloviruses, e.g., adenovirus, herpes virus, pox virus, vaccinia virus, SV40, papilloma virus, an RNA virus such as a retrovirus, e.g., lenti virus, a single-stranded RNA virus, e.g., hepatitis virus, or a double-stranded RNA virus e.g., rotavirus. Since, in some embodiments, recombinant retroviruses are defective, assistance may be provided order to produce infectious particles. Such assistance can be provided, e.g., by using helper cell lines that contain plasmids encoding all of the structural genes of the retrovirus under the control of regulatory sequences within the LTR. Suitable cell lines for replicating the curons described herein include cell lines known in the art, e.g., A549 cells, which can be modified as described herein. Said genetic element can additionally contain a gene encoding a selectable marker so that the desired genetic elements can be identified.

[0473] In some embodiments, the genetic element includes non-silent mutations, e.g., base substitutions, deletions, or additions resulting in amino acid differences in the encoded polypeptide, so long as the sequence remains at least about 70%, 75%, 80%, 85%, 90%, 95%, 96%, 97%, 98%, or 99% identical to the polypeptide encoded by the first nucleotide sequence or otherwise is useful for practicing the present invention. In this regard, certain conservative amino acid substitutions may be made which are generally recognized not to inactivate overall protein function: such as in regard of positively charged amino acids (and vice versa), lysine, arginine and histidine; in regard of negatively charged amino acids (and vice versa), aspartic acid and glutamic acid; and in regard of certain groups of neutrally charged amino acids (and in all cases, also vice versa), (1) alanine and serine, (2) asparagine, glutamine, and histidine, (3) cysteine and serine, (4) glycine and proline, (5) isoleucine, leucine and valine, (6) methionine, leucine and isoleucine, (7) phenylalanine, methionine, leucine, and tyrosine, (8) serine and threonine, (9) tryptophan and tyrosine, (10) and for example tyrosine, tryptophan and phenylalanine Amino acids can be classified according to physical properties and contribution to secondary and tertiary protein structure. A conservative substitution is recognized in the art as a substitution of one amino acid for another amino acid that has similar properties.

[0474] Identity of two or more nucleic acid or polypeptide sequences having the same or a specified percentage of nucleotides or amino acid residues that are the same (e.g., about 60%, 65%, 70%, 75%, 80%, 85%, 90%, 91%, 92%, 93%, 94%, 95%, 96%, 97%, 98%, 99%, or higher identity over a specified region, when compared and aligned for maximum correspondence over a comparison window or designated region) may be measured using a BLAST or BLAST 2.0 sequence comparison algorithms with default parameters described below, or by manual alignment and visual inspection (see, e.g., NCBI web site www.ncbi.nlm.nih.gov/BLAST/or the like). Identity may also refer to, or may be applied to, the compliment of a test sequence. Identity also includes sequences that have deletions and/or additions, as well as those that have substitutions. As described herein, the algorithms account for gaps and the like. Identity may exist over a region that is at least about 10 amino acids or nucleotides in length, about 15 amino acids or nucleotides in length, about 20 amino acids or nucleotides in length, about 25 amino acids or nucleotides in length, about 30 amino acids or nucleotides in length, about 35 amino acids or nucleotides in length, about 40 amino acids or nucleotides in length, about 45 amino acids or nucleotides in length, about 50 amino acids or nucleotides in length, or more.

[0475] In some embodiments, the genetic element comprises a nucleotide sequence with at least about 75% nucleotide sequence identity, at least about 80%, 85%, 90% 95%, 96%, 97%, 98%, 99% or 100% nucleotide sequence identity to any one of the nucleotide sequences described herein, e.g., Table 19 or Table 20. Since the genetic code is degenerate, a homologous nucleotide sequence can include any number of “silent” base changes, i.e. nucleotide substitutions that nonetheless encode the same amino acid.

[0476] Gene Editing Component

[0477] The genetic element of the synthetic curon may include one or more genes that encode a component of a gene editing system. Exemplary gene editing systems include the clustered regulatory interspaced short palindromic repeat (CRISPR) system, zinc finger nucleases (ZFNs), and Transcription Activator-Like Effector-based Nucleases (TALEN). ZFNs, TALENs, and CRISPR-based methods are described, e.g., in Gaj et al. Trends Biotechnol. 31.7(2013):397-405; CRISPR methods of gene editing are described, e.g., in Guan et al., Application of CRISPR-Cas system in gene therapy: Pre-clinical progress in animal model. DNA Repair 2016 October; 46:1-8. doi: 10.1016/j.dnarep.2016.07.004; Zheng et al., Precise gene deletion and replacement using the CRISPR/Cas9 system in human cells. BioTechniques, Vol. 57, No. 3, September 2014, pp. 115-124.

[0478] CRISPR systems are adaptive defense systems originally discovered in bacteria and archaea. CRISPR systems use RNA-guided nucleases termed CRISPR-associated or “Cas” endonucleases (e.g., Cas9 or Cpf1) to cleave foreign DNA. In a typical CRISPR/Cas system, an endonuclease is directed to a target nucleotide sequence (e. g., a site in the genome that is to be sequence-edited) by sequence-specific, non-coding “guide RNAs” that target single- or double-stranded DNA sequences. Three classes (I-III) of CRISPR systems have been identified. The class II CRISPR systems use a single Cas endonuclease (rather than multiple Cas proteins). One class II CRISPR system includes a type II Cas endonuclease such as Cas9, a CRISPR RNA (“crRNA”), and a trans-activating crRNA (“tracrRNA”). The crRNA contains a “guide RNA”, typically about 20-nucleotide RNA sequence that corresponds to a target DNA sequence. The crRNA also contains a region that binds to the tracrRNA to form a partially double-stranded structure which is cleaved by RNase III, resulting in a crRNA/tracrRNA hybrid. The crRNA/tracrRNA hybrid then directs the Cas9 endonuclease to recognize and cleave the target DNA sequence. The target DNA sequence must generally be adjacent to a “protospacer adjacent motif” (“PAM”) that is specific for a given Cas endonuclease; however, PAM sequences appear throughout a given genome.

[0479] In some embodiments, the curon includes a gene for a CRISPR endonuclease. For example, some CRISPR endonucleases identified from various prokaryotic species have unique PAM sequence requirements; examples of PAM sequences include 5′-NGG (Streptococcus pyogenes), 5′-NNAGAA (Streptococcus thermophilus CRISPR1), 5′-NGGNG (Streptococcus thermophilus CRISPR3), and 5′-NNNGATT (Neisseria meningiditis). Some endonucleases, e.g., Cas9 endonucleases, are associated with G-rich PAM sites, e. g., 5′-NGG, and perform blunt-end cleaving of the target DNA at a location 3 nucleotides upstream from (5′ from) the PAM site. Another class II CRISPR system includes the type V endonuclease Cpf1, which is smaller than Cas9; examples include AsCpf1 (from Acidaminococcus sp.) and LbCpf1 (from Lachnospiraceae sp.). Cpf1 endonucleases, are associated with T-rich PAM sites, e.g., 5′-TTN. Cpf1 can also recognize a 5′-CTA PAM motif. Cpf1 cleaves the target DNA by introducing an offset or staggered double-strand break with a 4- or 5-nucleotide 5′ overhang, for example, cleaving a target DNA with a 5-nucleotide offset or staggered cut located 18 nucleotides downstream from (3′ from) from the PAM site on the coding strand and 23 nucleotides downstream from the PAM site on the complimentary strand; the 5-nucleotide overhang that results from such offset cleavage allows more precise genome editing by DNA insertion by homologous recombination than by insertion at blunt-end cleaved DNA. See, e.g., Zetsche et al. (2015) Cell, 163:759-771.

[0480] A variety of CRISPR associated (Cas) genes may be included in the curon. Specific examples of genes are those that encode Cas proteins from class II systems including Cas1, Cas2, Cas3, Cas4, Cas5, Cas6, Cas7, Cas8, Cas9, Cas10, Cpf1, C2C1, or C2C3. In some embodiments, the curon includes a gene encoding a Cas protein, e.g., a Cas9 protein, may be from any of a variety of prokaryotic species. In some embodiments, the curon includes a gene encoding a particular Cas protein, e.g., a particular Cas9 protein, is selected to recognize a particular protospacer-adjacent motif (PAM) sequence. In some embodiments, the curon includes nucleic acids encoding two or more different Cas proteins, or two or more Cas proteins, may be introduced into a cell, zygote, embryo, or animal, e.g., to allow for recognition and modification of sites comprising the same, similar or different PAM motifs. In some embodiments, the curon includes a gene encoding a modified Cas protein with a deactivated nuclease, e.g., nuclease-deficient Cas9.

[0481] Whereas wild-type Cas9 protein generates double-strand breaks (DSBs) at specific DNA sequences targeted by a gRNA, a number of CRISPR endonucleases having modified functionalities are known, for example: a “nickase” version of Cas9 generates only a single-strand break; a catalytically inactive Cas9 (“dCas9”) does not cut the target DNA. A gene encoding a dCas9 can be fused with a gene encoding an effector domain to repress (CRISPRi) or activate (CRISPRa) expression of a target gene. For example, the gene may encode a Cas9 fusion with a transcriptional silencer (e.g., a KRAB domain) or a transcriptional activator (e.g., a dCas9-VP64 fusion). A gene encoding a catalytically inactive Cas9 (dCas9) fused to FokI nuclease (“dCas9-FokI”) can be included to generate DSBs at target sequences homologous to two gRNAs. See, e.g., the numerous CRISPR/Cas9 plasmids disclosed in and publicly available from the Addgene repository (Addgene, 75 Sidney St., Suite 550A, Cambridge, Mass. 02139; addgene.org/crispr/). A “double nickase” Cas9 that introduces two separate double-strand breaks, each directed by a separate guide RNA, is described as achieving more accurate genome editing by Ran et al. (2013) Cell, 154:1380-1389.

[0482] CRISPR technology for editing the genes of eukaryotes is disclosed in US Patent Application Publications 2016/0138008A1 and US2015/0344912A1, and in U.S. Pat. Nos. 8,697,359, 8,771,945, 8,945,839, 8,999,641, 8,993,233, 8,895,308, 8,865,406, 8,889,418, 8,871,445, 8,889,356, 8,932,814, 8,795,965, and 8,906,616. Cpf1 endonuclease and corresponding guide RNAs and PAM sites are disclosed in US Patent Application Publication 2016/0208243 A1.

[0483] In some embodiments, the curon comprises a gene encoding a polypeptide described herein, e.g., a targeted nuclease, e.g., a Cas9, e.g., a wild type Cas9, a nickase Cas9 (e.g., Cas9 D10A), a dead Cas9 (dCas9), eSpCas9, Cpf1, C2C1, or C2C3, and a gRNA. The choice of genes encoding the nuclease and gRNA(s) is determined by whether the targeted mutation is a deletion, substitution, or addition of nucleotides, e.g., a deletion, substitution, or addition of nucleotides to a targeted sequence. Genes that encode a catalytically inactive endonuclease e.g., a dead Cas9 (dCas9, e.g., D10A; H840A) tethered with all or a portion of (e.g., biologically active portion of) an (one or more) effector domain (e.g., VP64) create chimeric proteins that can modulate activity and/or expression of one or more target nucleic acids sequences.

[0484] As used herein, a “biologically active portion of an effector domain” is a portion that maintains the function (e.g. completely, partially, or minimally) of an effector domain (e.g., a “minimal” or “core” domain) In some embodiments, the curon includes a gene encoding a fusion of a dCas9 with all or a portion of one or more effector domains to create a chimeric protein useful in the methods described herein. Accordingly, in some embodiments, the curon includes a gene encoding a dCas9-methylase fusion. In other some embodiments, the curon includes a gene encoding a dCas9-enzyme fusion with a site-specific gRNA to target an endogenous gene.

[0485] In other aspects, the curon includes a gene encoding 1, 2, 3, 4, 5, 6, 7, 8, 9, 10, 11, 12, 13, 14, 15, 16, 17, 18, 19, 20, or more effector domains (all or a biologically active portion) fused with dCas9.

[0486] Proteinaceous Exterior

[0487] In some embodiments, the curon, e.g., synthetic curon, comprises a proteinaceous exterior that encloses the genetic element. The proteinaceous exterior can comprise a substantially non-pathogenic exterior protein that fails to elicit an immune response in a mammal. In some embodiments, the synthetic curon lacks lipids in the proteinaceous exterior. In some embodiments, the synthetic curon lacks a lipid bilayer, e.g., a viral envelope. In some embodiments, the interior of the synthetic curon is entirely covered (e.g., 100% coverage) by a proteinaceous exterior. In some embodiments, the interior of the synthetic curon is less than 100% covered by the proteinaceous exterior, e.g., 95%, 90%, 85%, 80%, 70%, 60%, 50% or less coverage. In some embodiments, the proteinaceous exterior comprises gaps or discontinuities, e.g., permitting permeability to water, ions, peptides, or small molecules, so long as the genetic element is retained in the curon.

[0488] In some embodiments, the proteinaceous exterior comprises one or more proteins or polypeptides that specifically recognize and/or bind a host cell, e.g., a complementary protein or polypeptide, to mediate entry of the genetic element into the host cell.

[0489] In some embodiments, the proteinaceous exterior comprises one or more of the following: one or more glycosylated proteins, a hydrophilic DNA-binding region, an arginine-rich region, a threonine-rich region, a glutamine-rich region, a N-terminal polyarginine sequence, a variable region, a C-terminal polyglutamine/glutamate sequence, and one or more disulfide bridges.

[0490] In some embodiments, the proteinaceous exterior comprises one or more of the following characteristics: an icosahedral symmetry, recognizes and/or binds a molecule that interacts with one or more host cell molecules to mediate entry into the host cell, lacks lipid molecules, lacks carbohydrates, is pH and temperature stable, is detergent resistant, and is substantially non-immunogenic or non-pathogenic in a host.

### Vectors

[0491] The genetic element described herein may be included in a vector. Suitable vectors as well as methods for their manufacture and their use are well known in the prior art.

[0492] In one aspect, the invention includes a vector comprising a genetic element comprising (i) a sequence encoding a non-pathogenic exterior protein, (ii) an exterior protein binding sequence that binds the genetic element to the non-pathogenic exterior protein, and (iii) a sequence encoding a regulatory nucleic acid.

[0493] The genetic element or any of the sequences within the genetic element can be obtained using any suitable method. Various recombinant methods are known in the art, such as, for example screening libraries from cells harboring viral sequences, deriving the sequences from a vector known to include the same, or isolating directly from cells and tissues containing the same, using standard techniques. Alternatively or in combination, part or all of the genetic element can be produced synthetically, rather than cloned.

[0494] In some embodiments, the vector includes regulatory elements, nucleic acid sequences homologous to target genes, and various reporter constructs for causing the expression of reporter molecules within a viable cell and/or when an intracellular molecule is present within a target cell.

[0495] Reporter genes are used for identifying potentially transfected cells and for evaluating the functionality of regulatory sequences. In general, a reporter gene is a gene that is not present in or expressed by the recipient organism or tissue and that encodes a polypeptide whose expression is manifested by some easily detectable property, e.g., enzymatic activity. Expression of the reporter gene is assayed at a suitable time after the DNA has been introduced into the recipient cells. Suitable reporter genes may include genes encoding luciferase, beta-galactosidase, chloramphenicol acetyl transferase, secreted alkaline phosphatase, or the green fluorescent protein gene (e.g., Ui-Tei et al., 2000 FEBS Letters 479: 79-82). Suitable expression systems are well known and may be prepared using known techniques or obtained commercially. In general, the construct with the minimal 5′ flanking region showing the highest level of expression of reporter gene is identified as the promoter. Such promoter regions may be linked to a reporter gene and used to evaluate agents for the ability to modulate promoter-driven transcription.

[0496] In some embodiments, the vector is substantially non-pathogenic and/or substantially non-integrating in a host cell or is substantially non-immunogenic in a host.

[0497] In some embodiments, the vector is in an amount sufficient to modulate one or more of phenotype, virus levels, gene expression, compete with other viruses, disease state, etc. at least about 5%, 10%, 15%, 20%, 25%, 30%, 35%, 40%, 45%, 50%, or more.

### Compositions

[0498] The synthetic curon or vector described herein may also be included in pharmaceutical compositions with a pharmaceutical excipient, e.g., as described herein. In some embodiments, the pharmaceutical composition comprises at least 10⁵, 10⁶, 10⁷, 10⁸, 10⁹, 10¹⁰, 10¹¹, 10¹², 10¹³, 10¹⁴, or 10¹⁵ synthetic curons. In some embodiments, the pharmaceutical composition comprises about 10⁵-10¹⁵, 10⁵-10¹⁰, or 10¹⁰-10¹⁵ synthetic curons. In some embodiments, the pharmaceutical composition comprises about 10⁸ (e.g., about 10⁵, 10⁶, 10⁷, 10⁸, 10⁹, or 10¹⁰) genomic equivalents/mL of the synthetic curon. In some embodiments, the pharmaceutical composition comprises 10⁵-10¹⁰, 10⁶-10¹⁰, 10⁷-10¹⁰, 10⁸-10¹⁰, 10⁹-10¹⁰, 10⁵-10⁶, 10⁵-10⁷, 10⁵-10⁸, or 10⁵-10⁹ genomic equivalents/mL of the synthetic curon, e.g., as determined according to the method of Example 18. In some embodiments, the pharmaceutical composition comprises sufficient synthetic curons to deliver at least 1, 2, 5, or 10, 100, 500, 1000, 2000, 5000, 8,000, 1×10⁴, 1×10⁵, 1×10⁶, 1×10⁷ or greater copies of a genetic element comprised in the curons per cell to a population of the eukaryotic cells. In some embodiments, the pharmaceutical composition comprises sufficient synthetic curons to deliver at least about 1×10⁴, 1×10⁵, 1×10⁶, 1× or 10⁷, or about 1×10⁴-1×10⁵, 1×10⁴-1×10⁶, 1×10⁴-1×10⁷, 1×10⁵-1×10⁶, 1×10⁵-1×10⁷, or 1×10⁶- 1×10⁷ copies of a genetic element comprised in the curons per cell to a population of the eukaryotic cells.

[0499] In some embodiments, the pharmaceutical composition has one or more of the following characteristics: the pharmaceutical composition meets a pharmaceutical or good manufacturing practices (GMP) standard; the pharmaceutical composition was made according to good manufacturing practices (GMP); the pharmaceutical composition has a pathogen level below a predetermined reference value, e.g., is substantially free of pathogens; the pharmaceutical composition has a contaminant level below a predetermined reference value, e.g., is substantially free of contaminants; or the pharmaceutical composition has low immunogenicity or is substantially non-immunogenic, e.g., as described herein.

[0500] In some embodiments, the pharmaceutical composition comprises below a threshold amount of one or more contaminants. Exemplary contaminants that are desirably excluded or minimized in the pharmaceutical composition include, without limitation, host cell nucleic acids (e.g., host cell DNA and/or host cell RNA), animal-derived components (e.g., serum albumin or trypsin), replication-competent viruses, non-infectious particles, free viral capsid protein, adventitious agents, and aggregates. In embodiments, the contaminant is host cell DNA. In embodiments, the composition comprises less than about 500 ng of host cell DNA per dose. In embodiments, the pharmaceutical composition consists of less than 10% (e.g., less than about 10%, 5%, 4%, 3%, 2%, 1%, 0.5%, or 0.1%) contaminant by weight.

[0501] In one aspect, the invention described herein includes a pharmaceutical composition comprising:

[0502] a) a synthetic curon comprising a genetic element comprising (i) a sequence encoding a non-pathogenic exterior protein, (ii) an exterior protein binding sequence that binds the genetic element to the non-pathogenic exterior protein, and (iii) a sequence encoding a regulatory nucleic acid; and a proteinaceous exterior that is associated with, e.g., envelops or encloses, the genetic element; and

[0503] b) a pharmaceutical excipient.

### Vesicles

[0504] In some embodiments, the composition further comprises a carrier component, e.g., a microparticle, liposome, vesicle, or exosome. In some embodiments, liposomes comprise spherical vesicle structures composed of a uni- or multilamellar lipid bilayer surrounding internal aqueous compartments and a relatively impermeable outer lipophilic phospholipid bilayer. Liposomes may be anionic, neutral or cationic. Liposomes are generally biocompatible, nontoxic, can deliver both hydrophilic and lipophilic drug molecules, protect their cargo from degradation by plasma enzymes, and transport their load across biological membranes (see, e.g., Spuch and Navarro, Journal of Drug Delivery, vol. 2011, Article ID 469679, 12 pages, 2011. doi:10.1155/2011/469679 for review).

[0505] Vesicles can be made from several different types of lipids; however, phospholipids are most commonly used to generate liposomes as drug carriers. Vesicles may comprise without limitation DOTMA, DOTAP, DOTIM, DDAB, alone or together with cholesterol to yield DOTMA and cholesterol, DOTAP and cholesterol, DOTIM and cholesterol, and DDAB and cholesterol. Methods for preparation of multilamellar vesicle lipids are known in the art (see for example U.S. Pat. No. 6,693,086, the teachings of which relating to multilamellar vesicle lipid preparation are incorporated herein by reference). Although vesicle formation can be spontaneous when a lipid film is mixed with an aqueous solution, it can also be expedited by applying force in the form of shaking by using a homogenizer, sonicator, or an extrusion apparatus (see, e.g., Spuch and Navarro, Journal of Drug Delivery, vol. 2011, Article ID 469679, 12 pages, 2011. doi:10.1155/2011/469679 for review). Extruded lipids can be prepared by extruding through filters of decreasing size, as described in Templeton et al., Nature Biotech, 15:647-652, 1997, the teachings of which relating to extruded lipid preparation are incorporated herein by reference.

[0506] As described herein, additives may be added to vesicles to modify their structure and/or properties. For example, either cholesterol or sphingomyelin may be added to the mixture to help stabilize the structure and to prevent the leakage of the inner cargo. Further, vesicles can be prepared from hydrogenated egg phosphatidylcholine or egg phosphatidylcholine, cholesterol, and dicetyl phosphate. (see, e.g., Spuch and Navarro, Journal of Drug Delivery, vol. 2011, Article ID 469679, 12 pages, 2011. doi:10.1155/2011/469679 for review). Also, vesicles may be surface modified during or after synthesis to include reactive groups complementary to the reactive groups on the recipient cells. Such reactive groups include without limitation maleimide groups. As an example, vesicles may be synthesized to include maleimide conjugated phospholipids such as without limitation DSPE-MaL-PEG2000.

[0507] A vesicle formulation may be mainly comprised of natural phospholipids and lipids such as 1,2-distearoryl-sn-glycero-3-phosphatidyl choline (DSPC), sphingomyelin, egg phosphatidylcholines and monosialoganglioside. Formulations made up of phospholipids only are less stable in plasma. However, manipulation of the lipid membrane with cholesterol reduces rapid release of the encapsulated cargo or 1,2-dioleoyl-sn-glycero-3-phosphoethanolamine (DOPE) increases stability (see, e.g., Spuch and Navarro, Journal of Drug Delivery, vol. 2011, Article ID 469679, 12 pages, 2011. doi:10.1155/2011/469679 for review).

[0508] In embodiments, lipids may be used to form lipid microparticles. Lipids include, but are not limited to, DLin-KC2-DMA4, C12-200 and colipids disteroylphosphatidyl choline, cholesterol, and PEG-DMG may be formulated (see, e.g., Novobrantseva, Molecular Therapy-Nucleic Acids (2012) 1, e4; doi:10.1038/mtna.2011.3) using a spontaneous vesicle formation procedure. The component molar ratio may be about 50/10/38.5/1.5 (DLin-KC2-DMA or C12-200/disteroylphosphatidyl choline/cholesterol/PEG-DMG). Tekmira has a portfolio of approximately 95 patent families, in the U.S. and abroad, that are directed to various aspects of lipid microparticles and lipid microparticles formulations (see, e.g., U.S. Pat. Nos. 7,982,027; 7,799,565; 8,058,069; 8,283,333; 7,901,708; 7,745,651; 7,803,397; 8,101,741; 8,188,263; 7,915,399; 8,236,943 and 7,838,658 and European Pat. Nos. 1766035; 1519714; 1781593 and 1664316), all of which may be used and/or adapted to the present invention.

[0509] In some embodiments, microparticles comprise one or more solidified polymer(s) that is arranged in a random manner. The microparticles may be biodegradable. Biodegradable microparticles may be synthesized, e.g., using methods known in the art including without limitation solvent evaporation, hot melt microencapsulation, solvent removal, and spray drying. Exemplary methods for synthesizing microparticles are described by Bershteyn et al., Soft Matter 4:1787-1787, 2008 and in US 2008/0014144 A1, the specific teachings of which relating to microparticle synthesis are incorporated herein by reference.

[0510] Exemplary synthetic polymers which can be used to form biodegradable microparticles include without limitation aliphatic polyesters, poly (lactic acid) (PLA), poly (glycolic acid) (PGA), co-polymers of lactic acid and glycolic acid (PLGA), polycarprolactone (PCL), polyanhydrides, poly(ortho)esters, polyurethanes, poly(butyric acid), poly(valeric acid), and poly(lactide-co-caprolactone), and natural polymers such as albumin, alginate and other polysaccharides including dextran and cellulose, collagen, chemical derivatives thereof, including substitutions, additions of chemical groups such as for example alkyl, alkylene, hydroxylations, oxidations, and other modifications routinely made by those skilled in the art), albumin and other hydrophilic proteins, zein and other prolamines and hydrophobic proteins, copolymers and mixtures thereof. In general, these materials degrade either by enzymatic hydrolysis or exposure to water, by surface or bulk erosion.

[0511] The microparticles' diameter ranges from 0.1-1000 micrometers (μm). In some embodiments, their diameter ranges in size from 1-750 μm, or from 50-500 μm, or from 100-250 μm. In some embodiments, their diameter ranges in size from 50-1000 μm, from 50-750 μm, from 50-500 μm, or from 50-250 μm. In some embodiments, their diameter ranges in size from 0.05-1000 μm, from 10-1000 μm, from 100-1000 μm, or from 500-1000 μm. In some embodiments, their diameter is about 0.5 μm, about 10 μm, about 50 μm, about 100 μm, about 200 μm, about 300 μm, about 350 μm, about 400 μm, about 450 μm, about 500 μm, about 550 μm, about 600 μm, about 650 μm, about 700 μm, about 750 μm, about 800 μm, about 850 μm, about 900 μm, about 950 μm, or about 1000 μm. As used in the context of microparticle diameters, the term “about” means+/−5% of the absolute value stated.

[0512] In some embodiments, a ligand is conjugated to the surface of the microparticle via a functional chemical group (carboxylic acids, aldehydes, amines, sulfhydryls and hydroxyls) present on the surface of the particle and present on the ligand to be attached. Functionality may be introduced into the microparticles by, for example, during the emulsion preparation of microparticles, incorporation of stabilizers with functional chemical groups.

[0513] Another example of introducing functional groups to the microparticle is during post-particle preparation, by direct crosslinking particles and ligands with homo- or heterobifunctional crosslinkers. This procedure may use a suitable chemistry and a class of crosslinkers (CDI, EDAC, glutaraldehydes, etc. as discussed in more detail below) or any other crosslinker that couples ligands to the particle surface via chemical modification of the particle surface after preparation. This also includes a process whereby amphiphilic molecules such as fatty acids, lipids or functional stabilizers may be passively adsorbed and adhered to the particle surface, thereby introducing functional end groups for tethering to ligands.

[0514] In some embodiments, the microparticles may be synthesized to comprise one or more targeting groups on their exterior surface to target a specific cell or tissue type (e.g., cardiomyocytes). These targeting groups include without limitation receptors, ligands, antibodies, and the like. These targeting groups bind their partner on the cells' surface. In some embodiments, the microparticles will integrate into a lipid bilayer that comprises the cell surface and the mitochondria are delivered to the cell.

[0515] The microparticles may also comprise a lipid bilayer on their outermost surface. This bilayer may be comprised of one or more lipids of the same or different type. Examples include without limitation phospholipids such as phosphocholines and phosphoinositols. Specific examples include without limitation DMPC, DOPC, DSPC, and various other lipids such as those described herein for liposomes.

[0516] In some embodiments, the carrier comprises nanoparticles, e.g., as described herein.

[0517] In some embodiments, the vesicles or microparticles described herein are functionalized with a diagnostic agent. Examples of diagnostic agents include, but are not limited to, commercially available imaging agents used in positron emissions tomography (PET), computer assisted tomography (CAT), single photon emission computerized tomography, x-ray, fluoroscopy, and magnetic resonance imaging (MRI); and contrast agents. Examples of suitable materials for use as contrast agents in MRI include gadolinium chelates, as well as iron, magnesium, manganese, copper, and chromium.

### Membrane Penetrating Polypeptides

[0518] In some embodiments, the composition further comprises a membrane penetrating polypeptide (MPP) to carry the components into cells or across a membrane, e.g., cell or nuclear membrane. Membrane penetrating polypeptides that are capable of facilitating transport of substances across a membrane include, but are not limited to, cell-penetrating peptides (CPPs)(see, e.g., U.S. Pat. No. 8,603,966), fusion peptides for plant intracellular delivery (see, e.g., Ng et al., PLoS One, 2016, 11:e0154081), protein transduction domains, Trojan peptides, and membrane translocation signals (MTS) (see, e.g., Tung et al., Advanced Drug Delivery Reviews 55:281-294 (2003)). Some MPP are rich in amino acids, such as arginine, with positively charged side chains.

[0519] Membrane penetrating polypeptides have the ability of inducing membrane penetration of a component and allow macromolecular translocation within cells of multiple tissues in vivo upon systemic administration. A membrane penetrating polypeptide may also refer to a peptide which, when brought into contact with a cell under appropriate conditions, passes from the external environment in the intracellular environment, including the cytoplasm, organelles such as mitochondria, or the nucleus of the cell, in amounts significantly greater than would be reached with passive diffusion.

[0520] Components transported across a membrane may be reversibly or irreversibly linked to the membrane penetrating polypeptide. A linker may be a chemical bond, e.g., one or more covalent bonds or non-covalent bonds. In some embodiments, the linker is a peptide linker. Such a linker may be between 2-30 amino acids, or longer. The linker includes flexible, rigid or cleavable linkers.

### Combinations

[0521] In one aspect, the synthetic curon or composition comprising a synthetic curon described herein may also include one or more heterologous moiety. In one aspect, the curon or composition comprising a synthetic curon described herein may also include one or more heterologous moiety in a fusion. In some embodiments, a heterologous moiety may be linked with the genetic element. In some embodiments, a heterologous moiety may be enclosed in the proteinaceous exterior as part of the curon. In some embodiments, a heterologous moiety may be administered with the synthetic curon.

[0522] In one aspect, the invention includes a cell or tissue comprising any one of the synthetic curons and heterologous moieties described herein.

[0523] In another aspect, the invention includes a pharmaceutical composition comprising a synthetic curon and the heterologous moiety described herein.

[0524] In some embodiments, the heterologous moiety may be a virus (e.g., an effector (e.g., a drug, small molecule), a targeting agent (e.g., a DNA targeting agent, antibody, receptor ligand), a tag (e.g., fluorophore, light sensitive agent such as KillerRed), or an editing or targeting moiety described herein.

[0525] In some embodiments, a membrane translocating polypeptide described herein is linked to one or more heterologous moieties. In one embodiment, the heterologous moiety is a small molecule (e.g., a peptidomimetic or a small organic molecule with a molecular weight of less than 2000 daltons), a peptide or polypeptide (e.g., an antibody or antigen-binding fragment thereof), a nanoparticle, an aptamer, or pharmacoagent.

[0526] Viruses

[0527] In some embodiments, the composition may further comprise a virus as a heterologous moiety, e.g., a single stranded DNA virus, e.g., Anellovirus, Bidnavirus, Circovirus, Geminivirus, Genomovirus, Inovirus, Microvirus, Nanovirus, Parvovirus, and Spiravirus. In some embodiments, the composition may further comprise a double stranded DNA virus, e.g., Adenovirus, Ampullavirus, Ascovirus, Asfarvirus, Baculovirus, Fusellovirus, Globulovirus, Guttavirus, Hytrosavirus, Herpesvirus, Iridovirus, Lipothrixvirus, Nimavirus, and Poxvirus. In some embodiments, the composition may further comprise an RNA virus, e.g., Alphavirus, Furovirus, Hepatitis virus, Hordeivirus, Tobamovirus, Tobravirus, Tricornavirus, Rubivirus, Birnavirus, Cystovirus, Partitivirus, and Reovirus. In some embodiments, the curon is administered with a virus as a heterologous moiety.

[0528] In some embodiments, the heterologous moiety may comprise a non-pathogenic, e.g., symbiotic, commensal, native, virus. In some embodiments, the non-pathogenic virus is one or more anelloviruses, e.g., Alphatorquevirus (TT), Betatorquevirus (TTM), and Gammatorquevirus (TTMD). In some embodiments, the anellovirus may include a Torque Teno Virus (TT), a SEN virus, a Sentinel virus, a TTV-like mini virus, a TT virus, a TT virus genotype 6, a TT virus group, a TTV-like virus DXL1, a TTV-like virus DXL2, a Torque Teno-like Mini Virus (TTM), or a Torque Teno-like Midi Virus (TTMD). In some embodiments, the non-pathogenic virus comprises one or more sequences having at least at least about 60%, 70% 80%, 85%, 90% 95%, 96%, 97%, 98% and 99% nucleotide sequence identity to any one of the nucleotide sequences described herein, e.g., Table 19 or Table 20.

[0529] In some embodiments, the heterologous moiety may comprise one or more viruses that are identified as lacking in the subject. For example, a subject identified as having dyvirosis may be administered a composition comprising a curon and one or more viral components or viruses that are imbalanced in the subject or having a ratio that differs from a reference value, e.g., a healthy subject.

[0530] In some embodiments, the heterologous moiety may comprise one or more non-anelloviruses, e.g., adenovirus, herpes virus, pox virus, vaccinia virus, SV40, papilloma virus, an RNA virus such as a retrovirus, e.g., lenti virus, a single-stranded RNA virus, e.g., hepatitis virus, or a double-stranded RNA virus e.g., rotavirus. In some embodiments, the curon or the virus is defective, or requires assistance in order to produce infectious particles. Such assistance can be provided, e.g., by using helper cell lines that contain a nucleic acid, e.g., plasmids or DNA integrated into the genome, encoding one or more of (e.g., all of) the structural genes of the replication defective curon or virus under the control of regulatory sequences within the LTR. Suitable cell lines for replicating the curons described herein include cell lines known in the art, e.g., A549 cells, which can be modified as described herein.

[0531] Effector

[0532] In some embodiments, the composition or synthetic curon may further comprise an effector that possesses effector activity. The effector may modulate a biological activity, for example increasing or decreasing enzymatic activity, gene expression, cell signaling, and cellular or organ function. Effector activities may also include binding regulatory proteins to modulate activity of the regulator, such as transcription or translation. Effector activities also may include activator or inhibitor functions. For example, the effector may induce enzymatic activity by triggering increased substrate affinity in an enzyme, e.g., fructose 2,6-bisphosphate activates phosphofructokinase 1 and increases the rate of glycolysis in response to the insulin. In another example, the effector may inhibit substrate binding to a receptor and inhibit its activation, e.g., naltrexone and naloxone bind opioid receptors without activating them and block the receptors' ability to bind opioids. Effector activities may also include modulating protein stability/degradation and/or transcript stability/degradation. For example, proteins may be targeted for degradation by the polypeptide co-factor, ubiquitin, onto proteins to mark them for degradation. In another example, the effector inhibits enzymatic activity by blocking the enzyme's active site, e.g., methotrexate is a structural analog of tetrahydrofolate, a coenzyme for the enzyme dihydrofolate reductase that binds to dihydrofolate reductase 1000-fold more tightly than the natural substrate and inhibits nucleotide base synthesis.

[0533] Targeting Moiety

[0534] In some embodiments, the composition or curon described herein may further comprise a targeting moiety, e.g., a targeting moiety that specifically binds to a molecule of interest present on a target cell. The targeting moiety may modulate a specific function of the molecule of interest or cell, modulate a specific molecule (e.g., enzyme, protein or nucleic acid), e.g., a specific molecule downstream of the molecule of interest in a pathway, or specifically bind to a target to localize the curon or genetic element. For example, a targeting moiety may include a therapeutic that interacts with a specific molecule of interest to increase, decrease or otherwise modulate its function.

[0535] Tagging or Monitoring Moiety

[0536] In some embodiments, the composition or synthetic curon described herein may further comprise a tag to label or monitor the curon or genetic element described herein. The tagging or monitoring moiety may be removable by chemical agents or enzymatic cleavage, such as proteolysis or intein splicing. An affinity tag may be useful to purify the tagged polypeptide using an affinity technique. Some examples include, chitin binding protein (CBP), maltose binding protein (MBP), glutathione-S-transferase (GST), and poly(His) tag. A solubilization tag may be useful to aid recombinant proteins expressed in chaperone-deficient species such as E. coli to assist in the proper folding in proteins and keep them from precipitating. Some examples include thioredoxin (TRX) and poly(NANP). The tagging or monitoring moiety may include a light sensitive tag, e.g., fluorescence. Fluorescent tags are useful for visualization. GFP and its variants are some examples commonly used as fluorescent tags. Protein tags may allow specific enzymatic modifications (such as biotinylation by biotin ligase) or chemical modifications (such as reaction with FlAsH-EDT2 for fluorescence imaging) to occur. Often tagging or monitoring moiety are combined, in order to connect proteins to multiple other components. The tagging or monitoring moiety may also be removed by specific proteolysis or enzymatic cleavage (e.g. by TEV protease, Thrombin, Factor Xa or Enteropeptidase).

[0537] Nanoparticles

[0538] In some embodiments, the composition or synthetic curon described herein may further comprise a nanoparticle. Nanoparticles include inorganic materials with a size between about 1 and about 1000 nanometers, between about 1 and about 500 nanometers in size, between about 1 and about 100 nm, between about 50 nm and about 300 nm, between about 75 nm and about 200 nm, between about 100 nm and about 200 nm, and any range therebetween. Nanoparticles generally have a composite structure of nanoscale dimensions. In some embodiments, nanoparticles are typically spherical although different morphologies are possible depending on the nanoparticle composition. The portion of the nanoparticle contacting an environment external to the nanoparticle is generally identified as the surface of the nanoparticle. In nanoparticles described herein, the size limitation can be restricted to two dimensions and so that nanoparticles include composite structure having a diameter from about 1 to about 1000 nm, where the specific diameter depends on the nanoparticle composition and on the intended use of the nanoparticle according to the experimental design. For example, nanoparticles used in therapeutic applications typically have a size of about 200 nm or below.

[0539] Additional desirable properties of the nanoparticle, such as surface charges and steric stabilization, can also vary in view of the specific application of interest. Exemplary properties that can be desirable in clinical applications such as cancer treatment are described in Davis et al, Nature 2008 vol. 7, pages 771-782; Duncan, Nature 2006 vol. 6, pages 688-701; and Allen, Nature 2002 vol. 2 pages 750-763, each incorporated herein by reference in its entirety. Additional properties are identifiable by a skilled person upon reading of the present disclosure. Nanoparticle dimensions and properties can be detected by techniques known in the art. Exemplary techniques to detect particles dimensions include but are not limited to dynamic light scattering (DLS) and a variety of microscopies such at transmission electron microscopy (TEM) and atomic force microscopy (AFM). Exemplary techniques to detect particle morphology include but are not limited to TEM and AFM. Exemplary techniques to detect surface charges of the nanoparticle include but are not limited to zeta potential method. Additional techniques suitable to detect other chemical properties comprise by ¹H, ¹¹B, and ¹³C and ¹⁹F NMR, UV/Vis and infrared/Raman spectroscopies and fluorescence spectroscopy (when nanoparticle is used in combination with fluorescent labels) and additional techniques identifiable by a skilled person.

[0540] Small Molecules

[0541] In some embodiments, the composition or synthetic curon described herein may further comprise a small molecule. Small molecule moieties include, but are not limited to, small peptides, peptidomimetics (e.g., peptoids), amino acids, amino acid analogs, synthetic polynucleotides, polynucleotide analogs, nucleotides, nucleotide analogs, organic and inorganic compounds (including heterorganic and organomettallic compounds) generally having a molecular weight less than about 5,000 grams per mole, e.g., organic or inorganic compounds having a molecular weight less than about 2,000 grams per mole, e.g., organic or inorganic compounds having a molecular weight less than about 1,000 grams per mole, e.g., organic or inorganic compounds having a molecular weight less than about 500 grams per mole, and salts, esters, and other pharmaceutically acceptable forms of such compounds. Small molecules may include, but are not limited to, a neurotransmitter, a hormone, a drug, a toxin, a viral or microbial particle, a synthetic molecule, and agonists or antagonists.

[0542] Examples of suitable small molecules include those described in, “The Pharmacological Basis of Therapeutics,” Goodman and Gilman, McGraw-Hill, New York, N.Y., (1996), Ninth edition, under the sections: Drugs Acting at Synaptic and Neuroeffector Junctional Sites; Drugs Acting on the Central Nervous System; Autacoids: Drug Therapy of Inflammation; Water, Salts and Ions; Drugs Affecting Renal Function and Electrolyte Metabolism; Cardiovascular Drugs; Drugs Affecting Gastrointestinal Function; Drugs Affecting Uterine Motility; Chemotherapy of Parasitic Infections; Chemotherapy of Microbial Diseases; Chemotherapy of Neoplastic Diseases; Drugs Used for Immunosuppression; Drugs Acting on Blood-Forming organs; Hormones and Hormone Antagonists; Vitamins, Dermatology; and Toxicology, all incorporated herein by reference. Some examples of small molecules include, but are not limited to, prion drugs such as tacrolimus, ubiquitin ligase or HECT ligase inhibitors such as heclin, histone modifying drugs such as sodium butyrate, enzymatic inhibitors such as 5-aza-cytidine, anthracyclines such as doxorubicin, beta-lactams such as penicillin, anti-bacterials, chemotherapy agents, anti-virals, modulators from other organisms such as VP64, and drugs with insufficient bioavailability such as chemotherapeutics with deficient pharmacokinetics.

[0543] In some embodiments, the small molecule is an epigenetic modifying agent, for example such as those described in de Groote et al. Nuc. Acids Res. (2012):1-18. Exemplary small molecule epigenetic modifying agents are described, e.g., in Lu et al. J. Biomolecular Screening 17.5(2012):555-71, e.g., at Table 1 or 2, incorporated herein by reference. In some embodiments, an epigenetic modifying agent comprises vorinostat or romidepsin. In some embodiments, an epigenetic modifying agent comprises an inhibitor of class I, II, III, and/or IV histone deacetylase (HDAC). In some embodiments, an epigenetic modifying agent comprises an activator of SirTI. In some embodiments, an epigenetic modifying agent comprises Garcinol, Lys-CoA, C646, (+)-JQI, I-BET, BICI, MS120, DZNep, UNC0321, EPZ004777, AZ505, AMI-I, pyrazole amide 7b, benzo[d]imidazole 17b, acylated dapsone derivative (e.e.g, PRMTI), methylstat, 4,4′-dicarboxy-2,2′-bipyridine, SID 85736331, hydroxamate analog 8, tanylcypromie, bisguanidine and biguanide polyamine analogs, UNC669, Vidaza, decitabine, sodium phenyl butyrate (SDB), lipoic acid (LA), quercetin, valproic acid, hydralazine, bactrim, green tea extract (e.g., epigallocatechin gallate (EGCG)), curcumin, sulforphane and/or allicin/diallyl disulfide. In some embodiments, an epigenetic modifying agent inhibits DNA methylation, e.g., is an inhibitor of DNA methyltransferase (e.g., is 5-azacitidine and/or decitabine). In some embodiments, an epigenetic modifying agent modifies histone modification, e.g., histone acetylation, histone methylation, histone sumoylation, and/or histone phosphorylation. In some embodiments, the epigenetic modifying agent is an inhibitor of a histone deacetylase (e.g., is vorinostat and/or trichostatin A).

[0544] In some embodiments, the small molecule is a pharmaceutically active agent. In one embodiment, the small molecule is an inhibitor of a metabolic activity or component. Useful classes of pharmaceutically active agents include, but are not limited to, antibiotics, anti-inflammatory drugs, angiogenic or vasoactive agents, growth factors and chemotherapeutic (anti-neoplastic) agents (e.g., tumour suppressers). One or a combination of molecules from the categories and examples described herein or from (Orme-Johnson 2007, Methods Cell Biol. 2007; 80:813-26) can be used. In one embodiment, the invention includes a composition comprising an antibiotic, anti-inflammatory drug, angiogenic or vasoactive agent, growth factor or chemotherapeutic agent.

[0545] Peptides or Proteins

[0546] In some embodiments, the composition or synthetic curon described herein may further comprise a peptide or protein. The peptide moieties may include, but are not limited to, a peptide ligand or antibody fragment (e.g., antibody fragment that binds a receptor such as an extracellular receptor), neuropeptide, hormone peptide, peptide drug, toxic peptide, viral or microbial peptide, synthetic peptide, and agonist or antagonist peptide.

[0547] Peptides moieties may be linear or branched. The peptide has a length from about 5 to about 200 amino acids, about 15 to about 150 amino acids, about 20 to about 125 amino acids, about 25 to about 100 amino acids, or any range therebetween.

[0548] Some examples of peptides include, but are not limited to, fluorescent tags or markers, antigens, antibodies, antibody fragments such as single domain antibodies, ligands and receptors such as glucagon-like peptide-1 (GLP-1), GLP-2 receptor 2, cholecystokinin B (CCKB) and somatostatin receptor, peptide therapeutics such as those that bind to specific cell surface receptors such as G protein-coupled receptors (GPCRs) or ion channels, synthetic or analog peptides from naturally-bioactive peptides, anti-microbial peptides, pore-forming peptides, tumor targeting or cytotoxic peptides, and degradation or self-destruction peptides such as an apoptosis-inducing peptide signal or photosensitizer peptide.

[0549] Peptides useful in the invention described herein also include small antigen-binding peptides, e.g., antigen binding antibody or antibody-like fragments, such as single chain antibodies, nanobodies (see, e.g., Steeland et al. 2016. Nanobodies as therapeutics: big opportunities for small antibodies. Drug Discov Today: 21(7):1076-113). Such small antigen binding peptides may bind a cytosolic antigen, a nuclear antigen, an intra-organellar antigen.

[0550] In some embodiments, the composition or curon described herein includes a polypeptide linked to a ligand that is capable of targeting a specific location, tissue, or cell.

[0551] Oligonucleotide Aptamers

[0552] In some embodiments, the composition or synthetic curon described herein may further comprise an oligonucleotide aptamer. Aptamer moieties are oligonucleotide or peptide aptamers. Oligonucleotide aptamers are single-stranded DNA or RNA (ssDNA or ssRNA) molecules that can bind to pre-selected targets including proteins and peptides with high affinity and specificity.

[0553] Oligonucleotide aptamers are nucleic acid species that may be engineered through repeated rounds of in vitro selection or equivalently, SELEX (systematic evolution of ligands by exponential enrichment) to bind to various molecular targets such as small molecules, proteins, nucleic acids, and even cells, tissues and organisms. Aptamers provide discriminate molecular recognition, and can be produced by chemical synthesis. In addition, aptamers may possess desirable storage properties, and elicit little or no immunogenicity in therapeutic applications.

[0554] Both DNA and RNA aptamers can show robust binding affinities for various targets. For example, DNA and RNA aptamers have been selected for t lysozyme, thrombin, human immunodeficiency virus trans-acting responsive element (HIV TAR), (see en.wikipedia.org/wiki/Aptamer-cite_note-10), hemin, interferon γ, vascular endothelial growth factor (VEGF), prostate specific antigen (PSA), dopamine, and the non-classical oncogene, heat shock factor 1 (HSF1).

[0555] Peptide Aptamers

[0556] In some embodiments, the composition or synthetic curon described herein may further comprise a peptide aptamer. Peptide aptamers have one (or more) short variable peptide domains, including peptides having low molecular weight, 12-14 kDa. Peptide aptamers may be designed to specifically bind to and interfere with protein-protein interactions inside cells.

[0557] Peptide aptamers are artificial proteins selected or engineered to bind specific target molecules. These proteins include of one or more peptide loops of variable sequence. They are typically isolated from combinatorial libraries and often subsequently improved by directed mutation or rounds of variable region mutagenesis and selection. In vivo, peptide aptamers can bind cellular protein targets and exert biological effects, including interference with the normal protein interactions of their targeted molecules with other proteins. In particular, a variable peptide aptamer loop attached to a transcription factor binding domain is screened against the target protein attached to a transcription factor activating domain. In vivo binding of the peptide aptamer to its target via this selection strategy is detected as expression of a downstream yeast marker gene. Such experiments identify particular proteins bound by the aptamers, and protein interactions that the aptamers disrupt, to cause the phenotype. In addition, peptide aptamers derivatized with appropriate functional moieties can cause specific post-translational modification of their target proteins, or change the subcellular localization of the targets

[0558] Peptide aptamers can also recognize targets in vitro. They have found use in lieu of antibodies in biosensors and used to detect active isoforms of proteins from populations containing both inactive and active protein forms. Derivatives known as tadpoles, in which peptide aptamer “heads” are covalently linked to unique sequence double-stranded DNA “tails”, allow quantification of scarce target molecules in mixtures by PCR (using, for example, the quantitative real-time polymerase chain reaction) of their DNA tails.

[0559] Peptide aptamer selection can be made using different systems, but the most used is currently the yeast two-hybrid system. Peptide aptamers can also be selected from combinatorial peptide libraries constructed by phage display and other surface display technologies such as mRNA display, ribosome display, bacterial display and yeast display. These experimental procedures are also known as biopannings Among peptides obtained from biopannings, mimotopes can be considered as a kind of peptide aptamers. All the peptides panned from combinatorial peptide libraries have been stored in a special database with the name MimoDB.

### Hosts

[0560] The invention is further directed to a host or host cell comprising a synthetic curon described herein. In some embodiments, the host or host cell is a plant, insect, bacteria, fungus, vertebrate, mammal (e.g., human), or other organism or cell. In certain embodiments, as confirmed herein, provided curons infect a range of different host cells. Target host cells include cells of mesodermal, endodermal, or ectodermal origin. Target host cells include, e.g., epithelial cells, muscle cells, white blood cells (e.g., lymphocytes), kidney tissue cells, lung tissue cells.

[0561] In some embodiments, the curon is substantially non-immunogenic in the host. The curon or genetic element fails to produce an undesired substantial response by the host's immune system. Some immune responses include, but are not limited to, humoral immune responses (e.g., production of antigen-specific antibodies) and cell-mediated immune responses (e.g., lymphocyte proliferation).

[0562] In some embodiments, a host or a host cell is contacted with (e.g., infected with) a synthetic curon. In some embodiments, the host is a mammal, such as a human. The amount of the curon in the host can be measured at any time after administration. In certain embodiments, a time course of curon growth in a culture is determined.

[0563] In some embodiments, the curon, e.g., a curon as described herein, is heritable. In some embodiments, the curon is transmitted linearly in fluids and/or cells from mother to child. In some embodiments, daughter cells from an original host cell comprise the curon. In some embodiments, a mother transmits the curon to child with an efficiency of at least 25%, 50%, 60%, 70%, 80%, 85%, 90%, 95%, or 99%, or a transmission efficiency from host cell to daughter cell at least 25%, 50%, 60%, 70%, 80%, 85%, 90%, 95%, or 99%. In some embodiments, the curon in a host cell has a transmission efficiency during meiosis of at 25%, 50%, 60%, 70%, 80%, 85%, 90%, 95%, or 99%. In some embodiments, the curon in a host cell has a transmission efficiency during mitosis of at least 25%, 50%, 60%, 70%, 80%, 85%, 90%, 95%, or 99%. In some embodiments, the curon in a cell has a transmission efficiency between about 10%-20%, 20%-30%, 30%-40%, 40%-50%, 50%-60%, 60%-70%, 70%-75%, 75%-80%, 80%-85%, 85%-90%, 90%-95%, 95%-99%, or any percentage therebetween.

[0564] In some embodiments, the curon, e.g., synthetic curon replicates within the host cell. In one embodiment, the synthetic curon is capable of replicating in a mammalian cell, e.g., human cell.

[0565] While in some embodiments the synthetic curon replicates in the host cell, the synthetic curon does not integrate into the genome of the host, e.g., with the host's chromosomes. In some embodiments, the synthetic curon has a negligible recombination frequency, e.g., with the host's chromosomes. In some embodiments, the curon has a recombination frequency, e.g., less than about 1.0 cM/Mb, 0.9 cM/Mb, 0.8 cM/Mb, 0.7 cM/Mb, 0.6 cM/Mb, 0.5 cM/Mb, 0.4 cM/Mb, 0.3 cM/Mb, 0.2 cM/Mb, 0.1 cM/Mb, or less, e.g., with the host's chromosomes.

### Methods of Use

[0566] The synthetic curons and compositions comprising synthetic curons described herein may be used in methods of treating a disease, disorder, or condition, e.g., in a subject (e.g., a mammalian subject, e.g., a human subject) in need thereof. Administration of a pharmaceutical composition described herein may be, for example, by way of parenteral (including intravenous, intratumoral, intraperitoneal, intramuscular, intracavity, and subcutaneous) administration. The synthetic curons may be administered alone or formulated as a pharmaceutical composition.

[0567] The synthetic curons may be administered in the form of a unit-dose composition, such as a unit dose parenteral composition. Such compositions are generally prepared by admixture and can be suitably adapted for parenteral administration. Such compositions may be, for example, in the form of injectable and infusable solutions or suspensions or suppositories or aerosols.

[0568] In some embodiments, administration of a synthetic curon or composition comprising same, e.g., as described herein, may result in delivery of a genetic element comprised by the synthetic curon to a target cell, e.g., in a subject.

[0569] A synthetic curon or composition thereof described herein, e.g., comprising an exogenous effector or payload, may be used to deliver the exogenous effector or payload to a cell, tissue, or subject. In some embodiments, the synthetic curon or composition thereof is used to deliver the exogenous effector or payload to bone marrow, blood, heart, GI or skin. Delivery of an exogenous effector or payload by administration of a synthetic curon composition described herein may modulate (e.g., increase or decrease) expression levels of a noncoding RNA or polypeptide in the cell, tissue, or subject. Modulation of expression level in this fashion may result in alteration of a functional activity in the cell to which the exogenous effector or payload is delivered. In some embodiments, the modulated functional activity may be enzymatic, structural, or regulatory in nature.

[0570] In some embodiments, the synthetic curon, or copies thereof, are detectable in a cell 24 hours (e.g., 1 day, 2 days, 3 days, 4 days, 5 days, 6 days, 1 week, 2 weeks, 3 weeks, 4 weeks, 30 days, or 1 month) after delivery into a cell. In embodiments, a synthetic curon or composition thereof mediates an effect on a target cell, and the effect lasts for at least 1, 2, 3, 4, 5, 6, or 7 days, 2, 3, or 4 weeks, or 1, 2, 3, 6, or 12 months. In some embodiments (e.g., wherein the synthetic curon or composition thereof comprises a genetic element encoding an exogenous protein), the effect lasts for less than 1, 2, 3, 4, 5, 6, or 7 days, 2, 3, or 4 weeks, or 1, 2, 3, 6, or 12 months.

[0571] Examples of diseases, disorders, and conditions that can be treated with the synthetic curon described herein, or a composition comprising the synthetic curon, include, without limitation: immune disorders, interferonopathies (e.g., Type I interferonopathies), infectious diseases, inflammatory disorders, autoimmune conditions, cancer (e.g., a solid tumor, e.g., lung cancer, non-small cell lung cancer, e.g., a tumor that expresses a gene responsive to mIR-625, e.g., caspase-3), and gastrointestinal disorders. In some embodiments, the synthetic curon modulates (e.g., increases or decreases) an activity or function in a cell with which the curon is contacted. In some embodiments, the synthetic curon modulates (e.g., increases or decreases) the level or activity of a molecule (e.g., a nucleic acid or a protein) in a cell with which the curon is contacted. In some embodiments, the synthetic curon decreases viability of a cell, e.g., a cancer cell, with which the curon is contacted, e.g., by at least about 10%, 20%, 30%, 40%, 50%, 60%, 70%, 80%, 90%, 95%, 99%, or more. In some embodiments, the synthetic curon comprises an effector, e.g., an miRNA, e.g., miR-625, that decreases viability of a cell, e.g., a cancer cell, with which the curon is contacted, e.g., by at least about 10%, 20%, 30%, 40%, 50%, 60%, 70%, 80%, 90%, 95%, 99%, or more. In some embodiments, the synthetic curon increases apoptosis of a cell, e.g., a cancer cell, e.g., by increasing caspase-3 activity, with which the curon is contacted, e.g., by at least about 10%, 20%, 30%, 40%, 50%, 60%, 70%, 80%, 90%, 95%, 99%, or more. In some embodiments, the synthetic curon comprises an effector, e.g., an miRNA, e.g., miR-625, that increases apoptosis of a cell, e.g., a cancer cell, e.g., by increasing caspase-3 activity, with which the curon is contacted, e.g., by at least about 10%, 20%, 30%, 40%, 50%, 60%, 70%, 80%, 90%, 95%, 99%, or more.

### Additional Curon Embodiments

[0572] In one aspect, the invention includes a synthetic curon comprising: a genetic element comprising (i) a sequence encoding a non-pathogenic exterior protein, (ii) an exterior protein binding sequence that binds the genetic element to the non-pathogenic exterior protein, and (iii) a sequence encoding an effector, e.g., a regulatory nucleic acid; and a proteinaceous exterior that is associated with, e.g., envelops or encloses, the genetic element.

[0573] In one aspect, the invention includes a pharmaceutical composition comprising: a) a curon comprising: a genetic element comprising (i) a sequence encoding a non-pathogenic exterior protein, (ii) an exterior protein binding sequence that binds the genetic element to the non-pathogenic exterior protein, and (iii) a sequence encoding an effector, e.g., a regulatory nucleic acid; and a proteinaceous exterior that is associated with, e.g., envelops or encloses, the genetic element; and b) a pharmaceutical excipient.

[0574] In various aspects of the invention delineated herein, one or more of the various embodiments described herein may be combined.

[0575] In some embodiments, curon or composition described herein further comprises at least one of the following characteristics: the genetic element is a single-stranded DNA; the genetic element is circular; the curon is non-integrating; the curon has a sequence, structure, and/or function based on an anellovirus or other non-pathogenic virus, and the curon is non-pathogenic.

[0576] In some embodiments, the proteinaceous exterior comprises the non-pathogenic exterior protein. In some embodiments, the proteinaceous exterior comprises one or more of the following: one or more glycosylated proteins, a hydrophilic DNA-binding region, an arginine-rich region, a threonine-rich region, a glutamine-rich region, a N-terminal polyarginine sequence, a variable region, a C-terminal polyglutamine/glutamate sequence, and one or more disulfide bridges. In some embodiments, the proteinaceous exterior comprises one or more of the following characteristics: an icosahedral symmetry, recognizes and/or binds a molecule that interacts with one or more host cell molecules to mediate entry into the host cell, lacks lipid molecules, lacks carbohydrates, is pH and temperature stable, is detergent resistant, and is non-immunogenic or non-pathogenic in a host. For example, data provided herein confirm that provided curons are infectious.

[0577] In some embodiments, the sequence encoding the non-pathogenic exterior protein comprise a sequence at least 70%, 80%, 85%, 90%, 95%, 96%, 97%, 98%, 99% identical to one or more sequences or a fragment thereof listed in Table 15. In some embodiments, the non-pathogenic exterior protein comprises a sequence at least 70%, 80%, 85%, 90%, 95%, 96%, 97%, 98%, 99% identical to one or more sequences or a fragment thereof listed in Table 16 or Table 17. In some embodiments, the non-pathogenic exterior protein comprises at least one functional domain that provides one or more functions, e.g., species and/or tissue and/or cell tropism, viral genome binding and/or packaging, immune evasion (non-immunogenicity and/or tolerance), pharmacokinetics, endocytosis and/or cell attachment, nuclear entry, intracellular modulation and localization, exocytosis modulation, propagation, and nucleic acid protection.

[0578] In some embodiments, the effector comprises a regulatory nucleic acid, e.g., an miRNA, siRNA, mRNA, lncRNA, RNA, DNA, an antisense RNA, gRNA; a therapeutic, e.g., fluorescent tag or marker, antigen, peptide therapeutic, synthetic or analog peptide from naturally-bioactive peptide, agonist or antagonist peptide, anti-microbial peptide, pore-forming peptide, a bicyclic peptide, a targeting or cytotoxic peptide, a degradation or self-destruction peptide, and degradation or self-destruction peptides, small molecule, immune effector (e.g., influences susceptibility to an immune response/signal), a death protein (e.g., an inducer of apoptosis or necrosis), a non-lytic inhibitor of a tumor (e.g., an inhibitor of an oncoprotein), an epigenetic modifying agent, epigenetic enzyme, a transcription factor, a DNA or protein modification enzyme, a DNA-intercalating agent, an efflux pump inhibitor, a nuclear receptor activator or inhibitor, a proteasome inhibitor, a competitive inhibitor for an enzyme, a protein synthesis effector or inhibitor, a nuclease, a protein fragment or domain, a ligand or a receptor, and a CRISPR system or component. In some embodiments, the effector comprises a sequence at least 70%, 80%, 85%, 90%, 95%, 96%, 97%, 98%, 99% identical to one or more miRNA sequences listed in Table 18. In some embodiments, the effector, e.g., miRNA, targets a host gene, e.g., modulates expression of the gene.

[0579] In some embodiments, the genetic element further comprises one or more of the following sequences: a sequence that encodes one or more miRNAs, a sequence that encodes one or more replication proteins, a sequence that encodes an exogenous gene, a sequence that encodes a therapeutic, a regulatory sequence (e.g., a promoter, enhancer), a sequence that encodes one or more regulatory sequences that targets endogenous genes (siRNA, lncRNAs, shRNA), a sequence that encodes a therapeutic mRNA or protein, and a sequence that encodes a cytolytic/cytotoxic RNA or protein. In some embodiments, the genetic element has one or more of the following characteristics: is non-integrating with a host cell's genome, is an episomal nucleic acid, is a single stranded DNA, is about 1 to 10 kb, exists within the nucleus of the cell, is capable of being bound by endogenous proteins, and produces a microRNA that targets host genes.

[0580] In some embodiments, the genetic element comprises at least one viral sequence or at least 70%, 80%, 85%, 90%, 95%, 96%, 97%, 98%, 99% identity to one or more sequences or a fragment thereof listed in Table 19 or Table 20. In one such embodiment, the viral sequence is from at least one of a single stranded DNA virus (e.g., Anellovirus, Bidnavirus, Circovirus, Geminivirus, Genomovirus, Inovirus, Microvirus, Nanovirus, Parvovirus, and Spiravirus), a double stranded DNA virus (e.g., Adenovirus, Ampullavirus, Ascovirus, Asfarvirus, Baculovirus, Fusellovirus, Globulovirus, Guttavirus, Hytrosavirus, Herpesvirus, Iridovirus, Lipothrixvirus, Nimavirus, and Poxvirus), a RNA virus (e.g., Alphavirus, Furovirus, Hepatitis virus, Hordeivirus, Tobamovirus, Tobravirus, Tricornavirus, Rubivirus, Birnavirus, Cystovirus, Partitivirus, and Reovirus). In another embodiment, the viral sequence is from one or more non-anelloviruses, e.g., adenovirus, herpes virus, pox virus, vaccinia virus, SV40, papilloma virus, an RNA virus such as a retrovirus, e.g., lenti virus, a single-stranded RNA virus, e.g., hepatitis virus, or a double-stranded RNA virus e.g., rotavirus.

[0581] In some embodiments, the protein binding sequence interacts with the arginine-rich region of the proteinaceous exterior.

[0582] In some embodiments, the curon is capable of replicating in a mammalian cell, e.g., human cell. In some embodiments, the curon is substantially non-pathogenic and/or non-integrating in a host cell. In some embodiments, the curon is substantially non-immunogenic in a host. In some embodiments, the curon inhibits/enhances one or more viral properties, e.g., tropism, e.g., infectivity, e.g., immunosuppression/activation, in a host or host cell. In some embodiments, the curon is in an amount sufficient to modulate (e.g., phenotype, virus levels, gene expression, compete with other viruses, disease state, etc. at least about 5%, 10%, 15%, 20%, 25%, 30%, 35%, 40%, 45%, 50%, or more).

[0583] In some embodiments, the composition further comprises at least one virus or vector comprising a genome of the virus, e.g., a variant of the curon, e.g., a commensal/native virus. In some embodiments, the composition further comprises a heterologous moiety, e.g., at least one small molecule, antibody, polypeptide, nucleic acid, targeting agent, imaging agent, nanoparticle, and a combination thereof.

[0584] In one aspect, the invention includes a vector comprising a genetic element comprising (i) a sequence encoding a non-pathogenic exterior protein, (ii) an exterior protein binding sequence that binds the genetic element to the non-pathogenic exterior protein, and (iii) a sequence encoding an effector, e.g., a regulatory nucleic acid.

[0585] In various aspects of the invention delineated herein, one or more of the various embodiments described herein may be combined.

[0586] In some embodiments, the genetic element fails to integrate with a host cell's genome. In some embodiments, the genetic element is capable of replicating in a mammalian cell, e.g., human cell.

[0587] In some embodiments, the vector further comprises an exogenous nucleic acid sequence, e.g., selected to modulate expression of a gene, e.g., a human gene.

[0588] In one aspect, the invention includes a pharmaceutical composition comprising the vector described herein and a pharmaceutical excipient.

[0589] In various aspects of the invention delineated herein, one or more of the various embodiments described herein may be combined.

[0590] In some embodiments, the vector is substantially non-pathogenic and/or non-integrating in a host cell. In some embodiments, the vector is substantially non-immunogenic in a host.

[0591] In some embodiments, the vector is in an amount sufficient to modulate (phenotype, virus levels, gene expression, compete with other viruses, disease state, etc. at least about 5%, 10%, 15%, 20%, 25%, 30%, 35%, 40%, 45%, 50%, or more).

[0592] In some embodiments, the composition further comprises at least one virus or vector comprising a genome of the virus, e.g., a variant of the curon, a commensal/native virus, a helper virus, a non-anellovirus. In some embodiments, the composition further comprises a heterologous moiety, at least one small molecule, antibody, polypeptide, nucleic acid, targeting agent, imaging agent, nanoparticle, and a combination thereof.

[0593] In one aspect, the invention includes a method of producing, propagating, and harvesting the curon described herein.

[0594] In one aspect, the invention includes a method of designing and making the vector described herein.

[0595] In one aspect, the invention includes a method of identifying dysvirosis in a subject comprising: analyzing genetic information from a sample obtained from a subject in need thereof, wherein viral genetic information is isolated from the subject's genetic information and other microorganisms; comparing the viral genetic information to a reference, e.g., a control, a healthy subject; and identifying dysvirosis in the subject if comparison of the viral genetic information yields an imbalance or irregular ratio of viral genetic information in the subject.

[0596] In various aspects of the invention delineated herein, one or more of the various embodiments described herein may be combined.

[0597] In some embodiments, the subject is administered the pharmaceutical composition further comprising one or more viral strains that are not represented in the viral genetic information. In some embodiments, the subject has inflammatory condition or disorder, autoimmune condition or disease, chronic/acute condition or disorder, cancer, gastrointestinal condition or disorder, or any combination thereof.

[0598] In embodiments, the synthetic curon inhibits interferon expression.

### Methods of Production

### Producing the Genetic Element

[0599] Methods of making the genetic element of the curon are described in, for example, Khudyakov & Fields, Artificial DNA: Methods and Applications, CRC Press (2002); in Zhao, Synthetic Biology: Tools and Applications, (First Edition), Academic Press (2013); and Egli & Herdewijn, Chemistry and Biology of Artificial Nucleic Acids, (First Edition), Wiley-VCH (2012).

[0600] In some embodiments, the genetic element may be designed using computer-aided design tools. The curon may be divided into smaller overlapping pieces (e.g., in the range of about 100 bp to about 10 kb segments or individual ORFs) that are easier to synthesize. These DNA segments are synthesized from a set of overlapping single-stranded oligonucleotides. The resulting overlapping synthons are then assembled into larger pieces of DNA, e.g., the curon. The segments or ORFs may be assembled into the curon, e.g., in vitro recombination or unique restriction sites at 5′ and 3′ ends to enable ligation.

[0601] The genetic element can alternatively be synthesized with a design algorithm that parses the curon into oligo-length fragments, creating optimal design conditions for synthesis that take into account the complexity of the sequence space. Oligos are then chemically synthesized on semiconductor-based, high-density chips, where over 200,000 individual oligos are synthesized per chip. The oligos are assembled with an assembly techniques, such as BioFab®, to build longer DNA segments from the smaller oligos. This is done in a parallel fashion, so hundreds to thousands of synthetic DNA segments are built at one time.

[0602] Each genetic element or segment of the genetic element may be sequence verified. In some embodiments, high-throughput sequencing of RNA or DNA can take place using AnyDot.chips (Genovoxx, Germany), which allows for the monitoring of biological processes (e.g., miRNA expression or allele variability (SNP detection). In particular, the AnyDot-chips allow for 10×-50× enhancement of nucleotide fluorescence signal detection. AnyDot.chips and methods for using them are described in part in International Publication Application Nos. WO 02088382, WO 03020968, WO 0303 1947, WO 2005044836, PCTEP 05105657, PCMEP 05105655; and German Patent Application Nos. DE 101 49 786, DE 102 14 395, DE 103 56 837, DE 10 2004 009 704, DE 10 2004 025 696, DE 10 2004 025 746, DE 10 2004 025 694, DE 10 2004 025 695, DE 10 2004 025 744, DE 10 2004 025 745, and DE 10 2005 012 301.

[0603] Other high-throughput sequencing systems include those disclosed in Venter, J., et al. Science 16 Feb. 2001; Adams, M. et al, Science 24 Mar. 2000; and M. J, Levene, et al. Science 299:682-686, January 2003; as well as US Publication Application No. 20030044781 and 2006/0078937. Overall such systems involve sequencing a target nucleic acid molecule having a plurality of bases by the temporal addition of bases via a polymerization reaction that is measured on a molecule of nucleic acid, i.e., the activity of a nucleic acid polymerizing enzyme on the template nucleic acid molecule to be sequenced is followed in real time. The sequence can then be deduced by identifying which base is being incorporated into the growing complementary strand of the target nucleic acid by the catalytic activity of the nucleic acid polymerizing enzyme at each step in the sequence of base additions. A polymerase on the target nucleic acid molecule complex is provided in a position suitable to move along the target nucleic acid molecule and extend the oligonucleotide primer at an active site. A plurality of labeled types of nucleotide analogs are provided proximate to the active site, with each distinguishably type of nucleotide analog being complementary to a different nucleotide in the target nucleic acid sequence. The growing nucleic acid strand is extended by using the polymerase to add a nucleotide analog to the nucleic acid strand at the active site, where the nucleotide analog being added is complementary to the nucleotide of the target nucleic acid at the active site. The nucleotide analog added to the oligonucleotide primer as a result of the polymerizing step is identified. The steps of providing labeled nucleotide analogs, polymerizing the growing nucleic acid strand, and identifying the added nucleotide analog are repeated so that the nucleic acid strand is further extended and the sequence of the target nucleic acid is determined.

[0604] In some embodiments, shotgun sequencing is performed. In shotgun sequencing, DNA is broken up randomly into numerous small segments, which are sequenced using the chain termination method to obtain reads. Multiple overlapping reads for the target DNA are obtained by performing several rounds of this fragmentation and sequencing. Computer programs then use the overlapping ends of different reads to assemble them into a continuous sequence.

### Producing the Synthetic Curon

[0605] The genetic elements and vectors comprising the genetic elements prepared as described herein can be used in a variety of ways to express the synthetic curon in appropriate host cells. In some embodiments, the genetic element and vectors comprising the genetic element are transfected in appropriate host cells and the resulting RNA may direct the expression of the curon gene products, e.g., non-pathogenic protein and protein binding sequence, at high levels. Host cell systems which provide for high levels of expression include continuous cell lines that supply viral functions, such as cell lines superinfected with APV or MPV, respectively, cell lines engineered to complement APV or MPV functions, etc.

[0606] In some embodiments, the synthetic curon is produced as described in any of Examples 1, 2, 5, 6, or 15-17.

[0607] In some embodiments, the synthetic curon is cultivated in continuous animal cell lines in vitro. According to one embodiment of the invention, the cell lines may include porcine cell lines. The cell lines envisaged in the context of the present invention include immortalised porcine cell lines such as, but not limited to the porcine kidney epithelial cell lines PK-15 and SK, the monomyeloid cell line 3D4/31 and the testicular cell line ST. Also, other mammalian cells likes are included, such as CHO cells (Chinese hamster ovaries), MARC-145, MDBK, RK-13, EEL. Additionally or alternatively, particular embodiments of the methods of the invention make use of an animal cell line which is an epithelial cell line, i.e. a cell line of cells of epithelial lineage. Cell lines susceptible to infection with curons include, but are not limited to cell lines of human or primate origin, such as human or primate kidney carcinoma cell lines.

[0608] In some embodiments, the genetic elements and vectors comprising the genetic elements are transfected into cell lines that express a viral polymerase protein in order to achieve expression of the curon. To this end, transformed cell lines that express a curon polymerase protein may be utilized as appropriate host cells. Host cells may be similarly engineered to provide other viral functions or additional functions.

[0609] To prepare the synthetic curon disclosed herein, a genetic element or vector comprising the genetic element disclosed herein may be used to transfect cells which provide curon proteins and functions required for replication and production. Alternatively, cells may be transfected with helper virus before, during, or after transfection by the genetic element or vector comprising the genetic element disclosed herein. In some embodiments, a helper virus may be useful to complement production of an incomplete viral particle. The helper virus may have a conditional growth defect, such as host range restriction or temperature sensitivity, which allows the subsequent selection of transfectant viruses. In some embodiments, a helper virus may provide one or more replication proteins utilized by the host cells to achieve expression of the curon. In some embodiments, the host cells may be transfected with vectors encoding viral proteins such as the one or more replication proteins.

[0610] The genetic element or vector comprising the genetic element disclosed herein can be replicated and produced into curon particles by any number of techniques known in the art, as described, e.g., in U.S. Pat. Nos. 4,650,764; 5,166,057; 5,854,037; European Patent Publication EP 0702085A1; U.S. patent application Ser. No. 09/152,845; International Patent Publications PCT WO97/12032; WO96/34625; European Patent Publication EP-A780475; WO 99/02657; WO 98/53078; WO 98/02530; WO 99/15672; WO 98/13501; WO 97/06270; and EPO 780 47SA1, each of which is incorporated by reference herein in its entirety.

[0611] The production of curon-containing cell cultures according to the present invention can be carried out in different scales, such as in flasks, roller bottles or bioreactors. The media used for the cultivation of the cells to be infected are known to the skilled person and will comprise the standard nutrients required for cell viability but may also comprise additional nutrients dependent on the cell type. Optionally, the medium can be protein-free. Depending on the cell type the cells can be cultured in suspension or on a substrate.

[0612] The purification and isolation of synthetic curons can be performed according to methods known by the skilled person in virus production and is described for example by Rinaldi, et al., DNA Vaccines:

[0613] Methods and Protocols (Methods in Molecular Biology), 3rd ed. 2014, Humana Press.

[0614] In one aspect, the present invention includes a method for the in vitro replication and propagation of the curon as described herein, which may comprise the following steps: (a) transfecting a linearized genetic element into a cell line sensitive to curon infection; (b) harvesting the cells and isolating cells showing the presence of the genetic element; (c) culturing the cells obtained in step (b) for at least three days, such as at least one week or longer, depending on experimental conditions and gene expression; and (d) harvesting the cells of step (c).

### Administration/Delivery

[0615] The composition (e.g., a pharmaceutical composition comprising a synthetic curon as described herein) may be formulated to include a pharmaceutically acceptable excipient. Pharmaceutical compositions may optionally comprise one or more additional active substances, e.g. therapeutically and/or prophylactically active substances. Pharmaceutical compositions of the present invention may be sterile and/or pyrogen-free. General considerations in the formulation and/or manufacture of pharmaceutical agents may be found, for example, in Remington: The Science and Practice of Pharmacy 21st ed., Lippincott Williams & Wilkins, 2005 (incorporated herein by reference).

[0616] Although the descriptions of pharmaceutical compositions provided herein are principally directed to pharmaceutical compositions which are suitable for administration to humans, it will be understood by the skilled artisan that such compositions are generally suitable for administration to any other animal, e.g., to non-human animals, e.g. non-human mammals Modification of pharmaceutical compositions suitable for administration to humans in order to render the compositions suitable for administration to various animals is well understood, and the ordinarily skilled veterinary pharmacologist can design and/or perform such modification with merely ordinary, if any, experimentation. Subjects to which administration of the pharmaceutical compositions is contemplated include, but are not limited to, humans and/or other primates; mammals, including commercially relevant mammals such as cattle, pigs, horses, sheep, cats, dogs, mice, and/or rats; and/or birds, including commercially relevant birds such as poultry, chickens, ducks, geese, and/or turkeys.

[0617] Formulations of the pharmaceutical compositions described herein may be prepared by any method known or hereafter developed in the art of pharmacology. In general, such preparatory methods include the step of bringing the active ingredient into association with an excipient and/or one or more other accessory ingredients, and then, if necessary and/or desirable, dividing, shaping and/or packaging the product.

[0618] In one aspect, the invention features a method of delivering a curon to a subject. The method includes administering a pharmaceutical composition comprising a curon as described herein to the subject. In some embodiments, the administered curon replicates in the subject (e.g., becomes a part of the virome of the subject).

[0619] In one aspect, the invention features a method of administering a curon to a subject with dysvirosis. The method includes selecting a subject having dysvirosis as described herein, and administering a pharmaceutical composition comprising a curon as described herein to the subject. In some embodiments, the administered curon replicates in the subject (e.g., becomes a part of the virome of the subject).

[0620] The pharmaceutical composition may include wild-type or native viral elements and/or modified viral elements. The curon may include one or more of the sequences (e.g., nucleic acid sequences or nucleic acid sequences encoding amino acid sequences thereof) in any of Tables 1-20 or a sequence with at least about 60%, 65%, 70%, 75%, 80%, 85%, 90% 95%, 96%, 97%, 98% and 99% nucleotide sequence identity to any one of the nucleotide sequences or a sequence that is complementary to the sequence in any of Tables 1-20. The curon may encode one or more of the sequences in any of Tables 1-20 or a sequence with at least about 60%, 65%, 70%, 75%, 80%, 85%, 90% 95%, 96%, 97%, 98% and 99% sequence identity to any one of the amino acid sequences in any of Tables 2, 4, 6, 8, 10, 12, 14, or 16. The curon may include one or more of the sequences in Table 19 or Table 20 or a sequence with at least about 60%, 65%, 70%, 75%, 80%, 85%, 90% 95%, 96%, 97%, 98% and 99% nucleotide sequence identity to any one of the nucleotide sequences or a sequence that is complementary to the sequence in Table 19 or Table 20.

[0621] In some embodiments, the synthetic curon is sufficient to increase (stimulate) endogenous gene and protein expression, e.g., at least about 5%, 10%, 15%, 20%, 25%, 30%, 35%, 40%, 45%, 50%, or more as compared to a reference, e.g., a healthy control. In certain embodiments, the synthetic curon is sufficient to decrease (inhibit) endogenous gene and protein expression, e.g., at least about 5%, 10%, 15%, 20%, 25%, 30%, 35%, 40%, 45%, 50%, or more as compared to a reference, e.g., a healthy control.

[0622] In some embodiments, the synthetic curon inhibits/enhances one or more viral properties, e.g., tropism, infectivity, immunosuppression/activation, in a host or host cell, e.g., at least about 5%, 10%, 15%, 20%, 25%, 30%, 35%, 40%, 45%, 50%, or more as compared to a reference, e.g., a healthy control.

[0623] In one aspect, the invention includes a method of identifying dysvirosis, e.g., dysregulation of viral populations present within a host, in a subject comprising analyzing genetic information from a sample obtained from a subject in need thereof, wherein viral genetic information is isolated from the subject's genetic information and other microorganisms; comparing the viral genetic information to a reference, e.g., a control, a healthy subject; and identifying dysvirosis in the subject if comparison of the viral genetic information yields an imbalance or irregular ratio of viral genetic information in the subject.

[0624] In one aspect, the present invention also includes a method for generating a database of genetic information for identifying dysviriosis in a diseased subject, which may comprise the following steps (i) determining nucleotide sequences of a host cell genome in a sample from a healthy subject; (ii) determining viral nucleic acid sequences present in the host cell genome and/or present in episomal form; (iii) compiling a database of the viral nucleic acid sequences determined in step (ii) associated with a specific viral strain; and (iv) repeat steps (i)-(iii) for a plurality of subjects to populate the database.

[0625] In one aspect, the invention includes a method of administering the pharmaceutical composition described herein to a subject with dysvirosis, comprising obtaining the viral genetic information as described herein and administering a pharmaceutical composition comprising the curon described herein in a dose sufficient to alter a virome within the subject, e.g., at least about 5%, 10%, 15%, 20%, 25%, 30%, 35%, 40%, 45%, 50%, or more as compared to a reference, e.g., a healthy control.

[0626] In some embodiments, the subject is administered the pharmaceutical composition further comprising one or more viral strains that are not represented in the viral genetic information.

[0627] In some embodiments, the pharmaceutical composition comprising a curon described herein is administered in a dose and time sufficient to modulate a viral infection. Some non-limiting examples of viral infections include adeno-associated virus, Aichi virus, Australian bat lyssavirus, BK polyomavirus, Banna virus, Barmah forest virus, Bunyamwera virus, Bunyavirus La Crosse, Bunyavirus snowshoe hare, Cercopithecine herpesvirus, Chandipura virus, Chikungunya virus, Cosavirus A, Cowpox virus, Coxsackievirus, Crimean-Congo hemorrhagic fever virus, Dengue virus, Dhori virus, Dugbe virus, Duvenhage virus, Eastern equine encephalitis virus, Ebolavirus, Echovirus, Encephalomyocarditis virus, Epstein-Barr virus, European bat lyssavirus, GB virus C/Hepatitis G virus, Hantaan virus, Hendra virus, Hepatitis A virus, Hepatitis B virus, Hepatitis C virus, Hepatitis E virus, Hepatitis delta virus, Horsepox virus, Human adenovirus, Human astrovirus, Human coronavirus, Human cytomegalovirus, Human enterovirus 68, Human enterovirus 70, Human herpesvirus 1, Human herpesvirus 2, Human herpesvirus 6, Human herpesvirus 7, Human herpesvirus 8, Human immunodeficiency virus, Human papillomavirus 1, Human papillomavirus 2, Human papillomavirus 16, Human papillomavirus 18, Human parainfluenza, Human parvovirus B19, Human respiratory syncytial virus, Human rhinovirus, Human SARS coronavirus, Human spumaretrovirus, Human T-lymphotropic virus, Human torovirus, Influenza A virus, Influenza B virus, Influenza C virus, Isfahan virus, JC polyomavirus, Japanese encephalitis virus, Junin arenavirus, KI Polyomavirus, Kunjin virus, Lagos bat virus, Lake Victoria marburgvirus, Langat virus, Lassa virus, Lordsdale virus, Louping ill virus, Lymphocytic choriomeningitis virus, Machupo virus, Mayaro virus, MERS coronavirus, Measles virus, Mengo encephalomyocarditis virus, Merkel cell polyomavirus, Mokola virus, Molluscum contagiosum virus, Monkeypox virus, Mumps virus, Murray valley encephalitis virus, New York virus, Nipah virus, Norwalk virus, O'nyong-nyong virus, Orf virus, Oropouche virus, Pichinde virus, Poliovirus, Punta toro phlebovirus, Puumala virus, Rabies virus, Rift valley fever virus, Rosavirus A, Ross river virus, Rotavirus A, Rotavirus B, Rotavirus C, Rubella virus, Sagiyama virus, Salivirus A, Sandfly fever sicilian virus, Sapporo virus, Semliki forest virus, Seoul virus, Simian foamy virus, Simian virus 5, Sindbis virus, Southampton virus, St. louis encephalitis virus, Tick-borne powassan virus, Torque teno virus, Toscana virus, Uukuniemi virus, Vaccinia virus, Varicella-zoster virus, Variola virus, Venezuelan equine encephalitis virus, Vesicular stomatitis virus, Western equine encephalitis virus, WU polyomavirus, West Nile virus, Yaba monkey tumor virus, Yaba-like disease virus, Yellow fever virus, and Zika Virus. In certain embodiments, the curon is sufficient to outcompete and/or displace a virus already present in the subject, e.g., at least about 5%, 10%, 15%, 20%, 25%, 30%, 35%, 40%, 45%, 50%, or more as compared to a reference. In certain embodiments, the curon is sufficient to compete with chronic or acute viral infection. In certain embodiments, the curon may be administered prophylactically to protect from viral infections (e.g. a provirotic). In some embodiments, the curon is in an amount sufficient to modulate (e.g., phenotype, virus levels, gene expression, compete with other viruses, disease state, etc. at least about 5%, 10%, 15%, 20%, 25%, 30%, 35%, 40%, 45%, 50%, or more).

[0628] All references and publications cited herein are hereby incorporated by reference.

[0629] The following examples are provided to further illustrate some embodiments of the present invention, but are not intended to limit the scope of the invention; it will be understood by their exemplary nature that other procedures, methodologies, or techniques known to those skilled in the art may alternatively be used.

### EXAMPLES

### Example 1: Preparation of Curons

[0630] This example describes the design and synthesis of a synthetic curon that inhibits interferon (IFN) expression.

[0631] A curon (Curon A) is designed starting with 1) a DNA sequence for a capsid gene encoding a non-pathogenic packaging enclosure (Arch Virol (2007) 152: 1961-1975), Accession Number: A7XCE8.1 (ORF11_TTW3); 2) a DNA sequence coding for a microRNA that targets a host gene (e.g. IFN) (PLOS Pathogen (2013), 9(12), e1003818), Accession number: AJ620231.1; and 3) a DNA sequence (Journal of Virology (2003), 77(24), 13036-13041) that binds to a specific region in the capsid protein, (e.g., specific region of capsid having an Accession Number: Q99153.1).

[0632] To this sequence is added lkb non-coding DNA sequences (Curon B). The designed curon (FIG. 2) is chemically synthesized into 3 kb (total size), which is sequence verified.

[0633] The curon sequence is transfected into human embryonic kidney 293T cells (1 mg per 10⁵ cells on 12-well plates) with JetPEI reagent (PolyPlus-transfection, Illkirch, France) as recommended by the manufacturer. Controls transfections are included with vector alone or cells transfected with JetPEI alone and transfection efficiencies are optimized with a reporter plasmid encoding GFP. Fluorescence of control transfections is measured to ensure properly transfected cells. Transfected cultures are incubated overnight at 37° C. and 5% carbon dioxide.

[0634] After 18 hrs, the cells are washed three times with PBS before adding fresh medium. The supernatant is collected for ultracentrifugation and harvest of curons as follows. The medium is cleared by centrifugation at 4,000×g for 30 min and then at 8,000×g for 15 min to remove cells and cell debris. The supernatant is then filtered through 0.45-μm-pore-size filters. Curons are pelleted at 27,000 rpm for 1 hr through a 5% sucrose cushion (5 ml) and resuspended in 1× phosphate-buffered saline (PBS) plus 0.1% bacitracin in 1/100 of the original volume. The concentrated Curons are centrifuged through a 20 to 35% sucrose step gradient at 24,000 rpm for 2 hr. The curon band at the gradient junction is collected. The curons are then diluted with 1×PBS and pelleted at 27,000 rpm for 1 hr. The Curon pellets are resuspended in 1×PBS and further purified through a 20 to 35% continuous sucrose gradient.

### Example 2: Large-Scale Production of Curons (Curon A and/or B)

[0635] This example describes production and propagation of curons.

[0636] Purified curons as described in Example 1 are prepared for large-scale amplification in spinner flasks with producer A549 cells grown in suspension. A549 cells are maintained in F12K medium, 10% fetal bovine serum, 2 mM glutamine and antibiotics. A549 cells are infected with curons at a curon load of 10⁶ curons to produce ˜1×10⁷ curon particles after an incubation at 37° C. and 5% carbon dioxide for 24 hrs. Cells are then washed three times with PBS and incubated with fresh medium for 6 hrs.

[0637] For curon purification, two ultracentrifugation steps based on cesium chloride gradients are performed followed by dialysis as follows (Bio-Protocol (2012) Bio101: e201). Cells are removed by centrifugation (6000×g for 10 min) and the supernatant is filtered through 0.8 and then 0.2 μm filters. The filtrate is concentrated by passage through filter membranes (100,000 mw) to a volume of 8 ml. The retentate is loaded into a cesium sulfate solution and centrifuged at 247,000×g for 20 h. Curon bands are removed, placed into 14,000 mw cutoff dialysis tubing, and dialyzed. A further concentration may be performed, if desired.

### Example 3: Effects of Curons In Vitro (Curon A)

[0638] This example describes in vitro assessment of expression and effector function, e.g., expression of the miRNA, of the curon after cell infection.

[0639] The effect of purified curons as described in Example 1 is assessed in vitro through endogenous gene regulation (e.g. IFN signaling). HEK293T cells are co-transfected with dual luciferase plasmids (firefly luciferase with an interferon-stimulated response element (ISRE) based promoter and transfection control Renilla luciferase with constitutive promoter): Luciferase reporter mix (pcDNA3.1dsRluc to pISRE-Luc at 1:4 ratio (Clonetech)) (J Virol (2008), 82: 9823-9828).

[0640] Curons are administered at multiplicity of infection of 10⁷ to HEK293T cells seeded in a 6-well plate (2 sets of triplicates-3 control wells and 3 experimental wells with Curon A).

[0641] After 48 hours, the media is replaced with new media with or without 100 u/ml of universal type I interferon (PBL, Piscataway, N.J.). Sixteen hours after IFN treatment, a dual-luciferase assay (J Virol (2008), 82: 9823-9828) is performed to determine IFN signaling. Firefly luciferase is normalized to Renilla luciferase expression to control for transfection differences. The fold induction of the ISRE ffLuc reporter is calculated by dividing the comparable experimental wells by the control wells and induction of each condition is compared relative to the negative control.

[0642] In an embodiment, a decreased luciferase signal in the curon treatment group compared to a control will indicate that the curons decrease IFN production in the cells.

### Example 4: Immunologic Effects of Curons (Curon A)

[0643] This example describes in vivo effector function, e.g., expression of the miRNA, of the curon after administration.

[0644] Purified curons prepared as described in Examples 1 and 2 are intravenously administered to healthy pigs at various doses using hundred-fold dilutions starting from 10¹⁴ genome equivalents per kilogram down to 0 genome equivalents per kilogram. In order to evaluate the effects on immune tolerance, pigs are injected daily for 3 days with the dosages of curons specified above or vehicle control PBS and sacrificed after 3 days.

[0645] Spleen, bone marrow and lymph nodes are harvested. Single cell suspensions are prepared from each of the tissues and stained with extracellular markers for MHC-II, CD11c, and intracellular IFN. MHC+, CD11c+, IFN+ antigen presenting cells are analyzed via flow cytometry from each tissue, e.g., wherein a cell that is positive for a given one of the above-mentioned markers is a cell that exhibits higher fluorescence than 99% of cells in a negative control population that lack expression of the marker but is otherwise similar to the assay population of cells, under the same conditions.

[0646] In an embodiment, a decreased number of IFN+ cells in the curon treatment group compared to the control will indicate that the curons decrease IFN production in cells after administration.

### Example 5: Preparation of Synthetic Curons

[0647] This example demonstrates in vitro production of a synthetic curon.

[0648] DNA sequences from LY1 and LY2 strains of TTMiniV (Eur Respir J. 2013 August; 42(2):470-9), between the EcoRV restriction enzyme sites, were cloned into a kanamycin vector (Integrated DNA Technologies). Curons including DNA sequences from the LY1 and LY2 strains of TTMiniV are referred to as Curon 1 and Curon 2 respectively, in Examples 6 and 7 and in FIGS. 6A-10B. Cloned constructs were transformed into 10-Beta competent E. coli. (New England Biolabs Inc.), followed by plasmid purification (Qiagen) according to the manufacturer's protocol.

[0649] DNA constructs (FIG. 3 and FIG. 4) were linearized with EcoRV restriction digest (New England Biolabs, Inc.) at 37 degree Celsius for 6 hours, followed by agarose gel electrophoresis, excision of a correctly size DNA band (2.9 kilobase pairs), and gel purification of DNA from excised agarose bands using a gel extraction kit (Qiagen) according to the manufacturer's protocol.

### Example 6: Assembly and Infection of Curons

[0650] This example demonstrates successful in vitro production of infectious curons using synthetic DNA sequences as described in Example 5.

[0651] Curon DNA (obtained in Example 5) was transfected into either HEK293T cells (human embryonic kidney cell line) or A549 cells (human lung carcinoma cell line), either in an intact plasmid or in linearized form, with lipid transfection reagent (Thermo Fisher Scientific). 6 ug of plasmid or 1.5 ug of linearized DNA was used for transfection of 70% confluent cells in T25 flasks. Empty vector backbone lacking the viral sequences included in the curon was used as a negative control. Six hours post-transfection, cells were washed with PBS twice and were allowed to grow in fresh growth medium at 37 degrees Celsius and 5% carbon dioxide. DNA sequences encoding the human Ef1alpha promoter followed by YFP gene were synthesized from IDT. This DNA sequence was blunt end ligated into a cloning vector (Thermo Fisher Scientific). The resulting vector was used as a control to assess transfection efficiency. YFP was detected using a cell imaging system (Thermo Fisher Scientific) 72 hours post transfection. The transfection efficiencies of HEK293T and A549 cells were calculated as 85% and 40% respectively (FIG. 5).

[0652] Supernatants of 293T and A549 cells transfected with curons were harvested 96 hours post transfection. The harvested supernatants were spun down at 2000 rpm for 10 minutes at 4 degrees Celsius to remove any cell debris. Each of the harvested supernatants was used to infect new 293T and A549 cells, respectively, that were 70% confluent in wells of 24 well plates. Supernatants were washed away after 24 hours of incubation at 37 degrees Celsius and 5% carbon dioxide, followed by two washes of PBS, and replacement with fresh growth medium. Following incubation of these cells at 37 degrees and 5% carbon dioxide for another 48 hours, cells were individually harvested for genomic DNA extraction. Genomic DNA from each of the samples was harvested using a genomic DNA extraction kit (Thermo Fisher Scientific), according to manufacturer's protocol.

[0653] To confirm thesuccessful infection of 293T and A549 cells by curons produced in vitro, 100 ng of genomic DNA harvested as described herein was used to perform quantitative polymerase chain reaction (qPCR) using primers specific for beta-torqueviruses or LY2 specific sequences. SYBR green reagent (Thermo Fisher Scientific) was used to perform qPCR, as per manufacturer's protocol. qPCR for primers specific to genomic DNA sequence of GAPDH was used for normalization. The sequences for all the primers used are listed in Table 21.

TABLE 21

| | Primer sequence (5′ > 3′) | |
|---|---|---|
| Target | Forward | Reverse |
| Betatorqueviruses | ATTCGAATGGCTGAGTTTATGC | CCTTGACTACGGTGGTTTCAC |
| | (SEQ ID NO: 690) | (SEQ ID NO: 693) |
| LY2 TTMiniV | CACGAATTAGCCAAGACTGGGCAC | TGCAGGCATTCGAGGGCTTGTT |
| strain | (SEQ ID NO: 691) | (SEQ ID NO: 694) |
| GAPDH | GCTCCCACTCCTGATTTCTG (SEQ | TTTAACCCCCTAGTCCCAGG |
| | ID NO: 692) | (SEQ ID NO: 695) |

[0654] As shown in the qPCR results depicted in FIGS. 6A, 6B, 7A, and 7B, the curons produced in vitro and as described in this example were infectious.

### Example 7: Selectivity of Curons

[0655] This example demonstrates the ability of synthetic curons produced in vitro to infect cell lines of a variety of tissue origins.

[0656] Supernatants with the infectious TTMiniV curons (described in Example 5) were incubated with 70% confluent 293T, A549, Jurkat (an acute T cell leukemia cell line), Raji (a Burkitt's lymphoma B cell line), and Chang (a liver carcinoma cell line) cell lines at 37 degrees and 5% carbon dioxide in wells of 24 well plates. Cells were washed with PBS twice, 24 hours post infection, followed by replacement with fresh growth medium. Cells were then incubated again at 37 degrees and 5% carbon dioxide for another 48 hours, followed by harvest for genomic DNA extraction. Genomic DNA from each of the samples was harvested using a genomic DNA extraction kit (Thermo Fisher Scientific), according to manufacturer's protocol.

[0657] To confirm successful infection of these cell lines by curons produced in the previous Example, 100 ng of genomic DNA harvested as described herein was used to perform quantitative polymerase chain reaction (qPCR) using primers specific for beta-torqueviruses or LY2 specific sequences. SYBR green reagent (Thermo Fisher Scientific) was used to perform qPCR, as per manufacturer's protocol. qPCR for primers specific to genomic DNA sequence of GAPDH was used for normalization. The sequences for all the primers used are listed in Table 21.

[0658] As shown in the qPCR results depicted in FIGS. 6A-10B, not only were curons produced in vitro infectious, they were able to infect a variety of cell lines, including examples of epithelial cells, lung tissue cells, liver cells, carcinoma cells, lymphocytes, lymphoblasts, T cells, B cells, and kidney cells. It was also observed that a synthetic curon was able to infect HepG2 cells, resulting in a greater than 100-fold increase relative to a control.

### Example 8: Identification and Use of Protein Binding Sequences

[0659] This example describes putative protein-binding sites in the Anellovirus genome, which can be used for amplifying and packaging effectors, e.g., in a curon as described herein. In some instances, the protein-binding sites may be capable of binding to an exterior protein, such as a capsid protein.

[0660] Two conserved domains within the Anellovirus genome are putative origins of replication: the 5′ UTR conserved domain (5CD) and the GC-rich domain (GCR) (de Villiers et al., Journal of Virology 2011; Okamoto et al., Virology 1999). In one example, in order to confirm whether these sequences act as DNA replication sites or as capsid packaging signals, deletions of each region are made in plasmids harboring TTMV-LY2. A539 cells are transfected with pTTMV-LY2A5CD or pTTMV-LY2AGCR. Transfected cells are incubated for four days, and then virus is isolated from supernatant and cell pellets. A549 cells are infected with virus, and after four days, virus is isolated from the supernatant and infected cell pellets. qPCR is performed to quantify viral genomes from the samples. Disruption of an origin of replication prevents viral replicase from amplifying viral DNA and results in reduced viral genomes isolated from transfected cell pellets compared to wild-type virus. A small amount of virus is still packaged and can be found in the transfected supernatant and infected cell pellets. In some embodiments, disruption of a packaging signal will prevent the viral DNA from being encapsulated by capsid proteins. Therefore, in embodiments, there will still be an amplification of viral genomes in the transfected cells, but no viral genomes are found in the supernatant or infected cell pellets.

[0661] In a further example, in order to characterize additional replication or packaging signals in the DNA, a series of deletions across the entire TTMV-LY2 genome is used. Deletions of 100 bp are made stepwise across the length of the sequence. Plasmids harboring TTMV-LY2 deletions are transfected into A549 and tested as described above. In some embodiments, deletions that disrupt viral amplification or packaging will contain potential cis-regulatory domains.

[0662] Replication and packaging signals can be incorporated into effector-encoding DNA sequences (e.g., in a genetic element in a curon) to induce amplification and encapsulation. This is done both in context of larger regions of the curon genome (i.e., inserting effectors into a specific site in the genome, or replacing viral ORFs with effectors, etc.), or by incorporating minimal cis signals into the effector DNA. In cases where the curon lacks trans replication or packaging factors (e.g., replicase and capsid proteins, etc.), the trans factors are supplied by helper genes. The helper genes express all of the proteins and RNAs sufficient to induce amplification and packaging, but lack their own packaging signals. The curon DNA is co-transfected with helper genes, resulting in amplification and packaging of the effector but not of the helper genes.

### Example 9: A Minimal Anellovirus Genome

[0663] This Example describes deletions in the Anellovirus genome, both to help characterize the minimal genome sufficient for replicating virus and to insert effector payloads.

[0664] A 172-nucleotide (nt) deletion was made in the non-coding region (NCR) of TTV-tth8 downstream of the ORFs but upstream of the GC-rich region (nts 3436 to 3607). A random 56-nt sequence (TTTGTGACACAAGATGGCCGACTTCCTTCCTCTTTAGTCTTCCCCAAAGAAGACAA (SEQ ID NO: 696)) was inserted into the deletion. 2 μg of circular or linearized (by Smal) pTTV-tth8(3436-3707::56nt), a DNA plasmid harboring the altered TTV-tth8, was transfected into HEK293 or A549 cells at 60% confluency in a 6 cm plate using lipofectamine 2000, in duplicate. Virus was isolated from cell pellets and supernatant 96 hours post transfection by freeze thaw, alternating three times between liquid nitrogen and 37° C. water bath. Virus from supernatant was used to re-infect cells (HEK293 cells infected by virus isolated from HEK293, and A549 cells infected by virus isolated from A549). 72 hours after infection, virus was isolated from cell pellets and supernatant by freeze thaw. qPCR was performed on all samples. As shown in Table 22 below, TTV-tth8 was observed in both the cell pellet and supernatant of infected cells, indicating successful virus production by pTTV-tth8(3436-3707::56nt). Therefore, TTV-tth8 is able to tolerate deletion of nts 3436 to 3707.

TABLE 22
TTV-tth8(3436-3707::56nt) infections in HEK293 and A549 result in viral
amplification. Average genome equivalents from duplicate experiments
compared to negative control cells with no plasmid or virus added.

| Genome | | | | | | | |
|---|---|---|---|---|---|---|---|
| Equivalents/Rx | | HEK293 P0 | HEK293 P1 | A549 P0 | A549 P1 | Negatives | |
| TTH8 | Sup | 2.45E+06 | 1.02E+03 | 1.87E+07 | 1.00E+04 | 293 Empty | 1.42E+02 |
| Linear | Cell | 2.52E+08 | 3.92E+05 | 2.89E+08 | 7.57E+05 | 293 Neg | 5.08E+02 |
| TTH8 | Sup | 1.69E+06 | 6.83E+02 | 5.07E+02 | 1.05E+04 | 549 Empty | 1.73E+01 |
| circular | Cell | 2.00E+08 | 3.75E+05 | 2.61E+08 | 8.36E+05 | 549 Neg | 2.08E+01 |

[0665] An engineered version of TTMV-LY2 was assembled, deleting nucleotides 574 to 1371 and 1432 to 2210 (1577 bp deletion) and inserting a 513 bp NanoLuc (nLuc) reporter ORF at the C-terminus of ORF1 (after nt 2609 in wild-type TTMV-LY2). Plasmids harboring the DNA sequence for the engineered TTMV-LY2 (pVL46-015B) were transfected into A549 cells, and then virus was isolated and used to infect new A549 cells, as described in Example 17. nLuc luminescence was detected in the cell pellets and supernatant of the infected cells, indicating viral replication (FIGS. 11A-11B). This demonstrates that TTMV-LY2 can tolerate at least a 1577 bp deletion in the ORF region.

[0666] To further characterize a minimal viral genome sufficient for replication, a series of deletions are made in the TTMV-LY2 DNA. A TTMV-LY2 with deletions of nts 574-1371 and 1432-2210 but no nLuc insertion is made and tested for viral replication as described previously. Further deletions are made to TTMV-LY2Δ574-1371,Δ1432-2210. Nts 1372-1431 are deleted to create TTMV-LY2Δ574-2210. Additionally, ORF3 sequence downstream of ORF1 is deleted (42610-2809). Finally, to test deletions in non-coding regions, a series of 100 bp deletions are made sequentially across the NCR. All deletion mutants are tested for viral replication as previously described. Deletions that result in successful viral production (indicating that the deleted region is not essential for viral replication) are combined to make variants of TTMV-LY2 with more deleted nucleotides. This strategy will provide a minimal virus sufficient for self-amplification. To identify the minimal virus that can be amplified with helpers, each of the deletion mutants that disrupted viral replication is tested alongside helper genes carrying trans replication and packaging elements. Deletions rescued by trans expression of replication elements indicate areas of the viral genome that can be deleted to form a minimal virus when helper genes are provided from a separate source.

### Example 10: Nucleotide Insertions of Various Lengths into an Anellovirus Genome

[0667] This example describes the addition of DNA sequences of various lengths into an Anellovirus genome, which can, in some instances, be used to generate a curon as described herein.

[0668] DNA sequences are cloned into plasmids harboring TTV-tth8 (GenBank accession number AJ620231.1) and TTMV-LY2 (GenBank accession number JX134045.1). Insertions are made in the noncoding regions (NCR) 3′ of the open reading frames and 5′ of the GC-rich region: after nucleotide 3588 in TTV-tth8, or nucleotide 2843 in TTMV-LY2.

[0669] Randomized DNA sequences of the following lengths are inserted into the NCRs of TTV-tth8 and TTMV-LY2: 100 base pairs (bp), 200 bp, 500 bp, 1000 bp, and 2000 bp. These sequences are designed to match the relative GC-content of each viral genome: approximately 50% GC for insertions into TTV-tth8, and approximately 38% GC for TTMV-LY2. In addition, several trans genes are inserted into the NCR. These include a miRNA driven by a U6 promoter (351 bp) and EGFP driven by a constitutive hEF1a promoter (2509 bp).

[0670] TTV-tth8 and TTMV-LY2 variants harboring various sized DNA inserts are transfected into mammalian cell lines, including HEK293 and A549, as previously described. Virus is isolated from the supernatant or cell pellets. Isolated virus is used to infect additional cells. Production of virus from the infected cells is monitored by quantitative PCR. In some embodiments, successful production of virus will indicate tolerance of insertions.

### Example 11: Exemplary Cargo to be Delivered

[0671] This example describes exemplary classes of nucleic acid and protein payloads that may be delivered with a curon, e.g., a curon based on an Anellovirus, e.g., as described herein.

[0672] One example of a payload is mRNA for protein expression. A coding sequence of interest is transcribed from either a viral promoter native to the source virus (e.g., an Anellovirus) or from a promoter introduced with the payload as part of a trans gene. Alternatively, the mRNA is encoded within the open reading frames of the viral mRNAs, resulting in fusions between viral proteins and the protein of interest. Cleavage domains, for example, the 2A peptide or a proteinase target site, may be used to separate the protein of interest from the viral proteins when desired.

[0673] Non-coding RNAs (ncRNAs) are another example of a payload. These RNAs are generally transcribed using RNA polymerase III promoters, such as U6 or VA. Alternatively, an ncRNA is transcribed using RNA polymerase II, such as the native viral promoter or regulatable synthetic promoters. When expressed from RNA polymerase II promoters, the ncRNAs are encoded as part of the mRNA exon, introns, or as extra RNA transcribed downstream of the poly-A signal. ncRNAs are often encoded as part of a larger RNA molecule or are cleaved apart using ribozymes or endoribonucleases. ncRNAs that can be encoded as cargo in the genome of a curon include micro-RNA (miRNA), small-interfering RNAs (siRNA), short hairpin RNA (shRNA), antisense RNA, miRNA sponges, long-noncoding RNA (lncRNA), and guide RNA (gRNA).

[0674] DNA may be used as a functional element without requiring RNA transcription. For example, DNA may be used as a template for homologous recombination. In another example, a protein-binding DNA sequence may be used to drive packaging of proteins of interest into a capsid (e.g., in a proteinaceous exterior of a curon). For homologous recombination, regions of homology to human genomic DNA are encoded into the vector DNA to act as homology arms. Recombination can be driven by a targeted endonuclease (such as Cas9 with a gRNA, or a zinc-finger nuclease), which can be expressed either from the vector or from a separate source. Inside the cell, a single-stranded DNA genome is converted to double-stranded DNA, which then acts as a template for homologous recombination at the genomic DNA break site. For recruiting proteins of interest, a protein-binding sequence can be encoded in the curon DNA. A DNA-binding protein of interest, or a protein of interest fused to a DNA-binding protein (such as Gal4), binds to the curon DNA. When the curon DNA is encapsulated by the capsid proteins, the DNA-binding protein is encapsulated too, and can be delivered to cells with the curon.

### Example 12: Exemplary Payload Integration Loci

[0675] This example describes exemplary loci in the genomes of TTV-tth8 (GenBank accession number AJ620231.1) and TTMV-LY2 (GenBank accession number JX134045) into which nucleic acid payloads can be inserted.

[0676] Several strategies can be employed for insertions into the open reading frame (ORF) regions of TTV-tth8 (nucleotides 336 to 3015) and TTMV-LY2 (nucleotides 424 to 2812). In one example, in order to tag viral proteins or create fusion proteins, a payload is inserted in frame within the specific ORF of interest. Alternatively, part or all of the ORF region is deleted, which may or may not disrupt viral protein function. The payload is then inserted into the deleted region. Additionally, a hyper-variable domain (HVD) in ORF1 of TTV-tth8 (between nucleotides 716 and 2362) or TTMV-LY2 (between nucleotides 724 and 2273) can be used as an insertion site.

[0677] Alternatively, payload insertions are made into regions of the vector comparable to the non-coding regions (NCRs) of TTV-tth8 or TTMV-LY2. In particular, insertions are made in the 5′ NCR upstream of the TATA box, in the 5′ untranslated region (UTR), in the 3′ NCR downstream of the poly-A signal and upstream of the GC-rich region. Additionally, insertions are made into the miRNA region of TTV-tth8 (nucleotides 3429 to 3506). For the 5′ NCR region, insertions are made upstream of the TATA box (between nucleotides 1 and 82 in TTV-tth8, and nucleotides 1 and 236 in TTMV-LY2). In some embodiments, trans genes are inserted in the reverse orientation to reduce promoter interference. For the 5′ UTR, insertions are made downstream of the transcriptional start site (nucleotide 111 in TTV-tth8, and nucleotide 267 in TTMV-LY2) and upstream of the ORF2 start codon (nucleotide 336 in TTV-tth8, and nucleotide 421 in TTMV-LY2). 5′ UTR insertions add or replace nucleotides in the 5′ UTR. 3′ NCR insertions are made upstream of the GC-rich region, in particular after nucleotide 3588 in TTV-tth8 or nucleotide 2843 in TTMV-LY2, as described in Example 10. The miRNA of TTV-tth8 is replaced by alternative natural or synthetic miRNA hairpins.

### Example 13: Defined Categories of Anellovirus and Conserved Regions Thereof

[0678] There are three genera of Anellovirus present in humans: alphatorquevirus (Torque Teno Virus, TTV), betatorquevirus (Torque Teno Midi Virus, TTMDV), and gammatorquevirus (Torque Teno Mini Virus, TTMV). Within alphatorquevirus, there are five well-supported phylogenetic clades (FIG. 11C). It is contemplated that any of these Anelloviruses can be used as a source virus (e.g., a source of viral DNA sequences) for producing a curon as described herein.

[0679] Among these sequences, the highest conservation is found in the 5′ UTR domain (about 75% conserved) and the GC-rich domain (greater than 100 base pairs, greater than 70% GC-content, about 70% conserved). Additional, a hypervariable domain (HVD) in the sequences has very low conservation (about 30% conserved). All Anelloviruses also contain a region in which all three reading frames are open.

[0680] Also provided herein are exemplary sequences of representative viruses from each of the TTV clades, and of TTMDV and TTMV, annotated with the conserved regions (see, e.g., Tables 1-14).

### Example 14: Replication-Deficient Curons and Helper Viruses

[0681] For replication and packaging of a curon, some elements can be provided in trans. These include proteins or non-coding RNAs that direct or support DNA replication or packaging. Trans elements can, in some instances, be provided from a source alternative to the curon, such as a helper virus, plasmid, or from the cellular genome.

[0682] Other elements are typically provided in cis. These elements can be, for example, sequences or structures in the curon DNA that act as origins of replication (e.g., to allow amplification of curon DNA) or packaging signals (e.g., to bind to proteins to load the genome into the capsid). Generally, a replication deficient virus or curon will be missing one or more of these elements, such that the DNA is unable to be packaged into an infectious virion or curon even if other elements are provided in trans.

[0683] Replication deficient viruses can be useful as helper viruses, e.g., for controlling replication of a curon (e.g., a replication-deficient or packaging-deficient curon) in the same cell. In some instances, the helper virus will lack cis replication or packaging elements, but express trans elements such as proteins and non-coding RNAs. Generally, the therapeutic curon would lack some or all of these trans elements and would therefore be unable to replicate on its own, but would retain the cis elements. When co-transfected/infected into cells, the replication-deficient helper virus would drive the amplification and packaging of the curon. The packaged particles collected would thus be comprised solely of therapeutic curon, without helper virus contamination.

[0684] To develop a replication deficient curon, conserved elements in the non-coding regions of Anellovirus will be removed. In particular, deletions of the conserved 5′ UTR domain and the GC-rich domain will be tested, both separately and together. Both elements are contemplated to be important for viral replication or packaging. Additionally, deletion series will be performed across the entire non-coding region to identify previously unknown regions of interest.

[0685] Successful deletion of a replication element will result in reduction of curon DNA amplification within the cell, e.g., as measured by qPCR, but will support some infectious curon production, e.g., as monitored by assays on infected cells that can include any or all of qPCR, western blots, fluorescence assays, or luminescence assays. Successful deletion of a packaging element will not disrupt curon DNA amplification, so an increase in curon DNA will be observed in transfected cells by qPCR. However, the curon genomes will not be encapsulated, so no infectious curon production will be observed.

### Example 15: Manufacturing Process for Replication-Competent Curons

[0686] This example describes a method for recovery and scaling up of production of replication-competent curons. Curons are replication competent when they encode in their genome all the required genetic elements and ORFs necessary to replicate in cells. Since these curons are not defective in their replication they do not need a complementing activity provided in trans. They might, however need helper activity, such as enhancers of transcriptions (e.g. sodium butyrate) or viral transcription factors (e.g. adenoviral E1, E2 E4, VA; HSV Vpl6 and immediate early proteins).

[0687] In this example, double-stranded DNA encoding the full sequence of a synthetic curon either in its linear or circular form is introduced into 5E+05 adherent mammalian cells in a T75 flask by chemical transfection or into 5E+05 cells in suspension by electroporation. After an optimal period of time (e.g., 3-7 days post transfection), cells and supernatant are collected by scraping cells into the supernatant medium. A mild detergent, such as a biliary salt, is added to a final concentration of 0.5% and incubated at 37° C. for 30 minutes. Calcium and Magnesium Chloride is added to a final concentration of 0.5 mM and 2.5 mM, respectively. Endonuclease (e.g. DNAse I, Benzonase), is added and incubated at 25-37° C. for 0.5-4 hours. Curon suspension is centrifuged at 1000×g for 10 minutes at 4° C. The clarified supernatant is transferred to a new tube and diluted 1:1 with a cryoprotectant buffer (also known as stabilization buffer) and stored at −80° C. if desired. This produces passage 0 of the curon (P0). To bring the concentration of detergent below the safe limit to be used on cultured cells, this inoculum is diluted at least 100-fold or more in serum-free media (SFM) depending on the curon titer.

[0688] A fresh monolayer of mammalian cells in a T225 flask is overlaid with the minimum volume sufficient to cover the culture surface and incubated for 90 minutes at 37° C. and 5% carbon dioxide with gentle rocking. The mammalian cells used for this step may or may not be the same type of cells as used for the P0 recovery. After this incubation, the inoculum is replaced with 40 ml of serum-free, animal origin-free culture medium. Cells are incubated at 37° C. and 5% carbon dioxide for 3-7 days. 4 ml of a 10× solution of the same mild detergent previously utilized is added to achieve a final detergent concentration of 0.5%, and the mixture is then incubated at 37° C. for 30 minutes with gentle agitation. Endonuclease is added and incubated at 25-37° C. for 0.5-4 hours. The medium is then collected and centrifuged at 1000×g at 4° C. for 10 minutes. The clarified supernatant is mixed with 40 ml of stabilization buffer and stored at −80° C. This generates a seed stock, or passage 1 of curon (P1).

[0689] Depending on the titer of the stock, it is diluted no less than 100-fold in SFM and added to cells grown on multilayer flasks of the required size. Multiplicity of infection (MOI) and time of incubation is optimized at smaller scale to ensure maximal curon production. After harvest, curons may then be purified and concentrated as needed. A schematic showing a workflow, e.g., as described in this example, is provided in FIG. 12.

### Example 16: Manufacturing Process of Replication-Deficient Curons

[0690] This example describes a method for recovery and scaling up of production of replication-deficient curons.

[0691] Curons can be rendered replication-deficient by deletion of one or more ORFs (e.g., ORF1,

[0692] ORF1/1, ORF1/2, ORF2, ORF2/2, ORF2/3, and/or ORF2t/3) involved in replication. Replication-deficient curons can be grown in a complementing cell line. Such cell line constitutively expresses components that promote curon growth but that are missing or nonfunctional in the genome of the curon.

[0693] In one example, the sequence(s) of any ORF(s) involved in curon propagation are cloned into a lentiviral expression system suitable for the generation of stable cell lines that encode a selection marker, and lentiviral vector is generated as described herein. A mammalian cell line capable of supporting curon propagation is infected with this lentiviral vector and subjected to selective pressure by the selection marker (e.g., puromycin or any other antibiotic) to select for cell populations that have stably integrated the cloned ORFs. Once this cell line is characterized and certified to complement the defect in the engineered curon, and hence to support growth and propagation of such curons, it is expanded and banked in cryogenic storage. During expansion and maintenance of these cells, the selection antibiotic is added to the culture medium to maintain the selective pressure. Once curons are introduced into these cells, the selection antibiotic may be withheld.

[0694] Once this cell line is established, growth and production of replication-deficient curons is carried out, e.g., as described in Example 15.

### Example 17: Production of Curons Using Suspension Cells

[0695] This example describes the production of curons in cells in suspension.

[0696] In this example, an A549 or 293T producer cell line that is adapted to grow in suspension conditions is grown in animal component-free and antibiotic-free suspension medium (Thermo Fisher Scientific) in WAVE bioreactor bags at 37 degrees and 5% carbon dioxide. These cells, seeded at 1×10⁶ viable cells/mL, are transfected using lipofectamine 2000 (Thermo Fisher Scientific) under current good manufacturing practices (cGMP), with a plasmid comprising curon sequences, along with any complementing plasmids suitable or required to package the curon (e.g., in the case of a replication-deficient curon, e.g., as described in Example 16). The complementing plasmids can, in some instances, encode for viral proteins that have been deleted from the curon genome (e.g., a curon genome based on a viral genoe, e.g., an Anellovirus genome, e.g., as described herein) but are useful or required for replication and packaging of the curons. Transfected cells are grown in the WAVE bioreactor bags and the supernatant is harvested at the following time points: 48, 72, and 96 hours post transfection. The supernatant is separated from the cell pellets for each sample using centrifugation. The packaged curon particles are then purified from the harvested supernatant and the lysed cell pellets using ion exchange chromatography.

[0697] The genome equivalents in the purified prep of the curons can be determined, for example, by using a small aliquot of the purified prep to harvest the curon genome using a viral genome extraction kit (Qiagen), followed by qPCR using primers and probes targeted towards the curon DNA sequence, e.g., as described in Example 18.

[0698] The infectivity of the curons in the purified prep can be quantified by making serial dilutions of the purified prep to infect new A549 cells. These cells are harvested 72 hours post transfection, followed by a qPCR assay on the genomic DNA using primers and probes that are specific to the curon DNA sequence.

### Example 18: Quantification of Curon Genome Equivalents by qPCR

[0699] This example demonstrates the development of a hydrolysis probe-based quantitative PCR assay to quantify curons. Sets of primers and probes were designed based on selected genome sequences of TTV (Accession No. AJ620231.1) and TTMV (Accession No. JX134045.1) using the software Geneious with a final user optimization. Primer sequences are shown in Table 23 below.

TABLE 23
Sequences of forward and reverse primers
and hydrolysis probes used to quantify TTMV
and TTV genome equivalents by quantitative PCR.

| | | SEQ |
|---|---|---|
| | | ID NO: |
| TTMV | | |
| Forward Primer | 5′-GAAGCCCACCAAAAGCAATT-3′ | 697 |
| Reverse Primer | 5′-AGTTCCCGTGTCTATAGTCGA-3′ | 698 |
| Probe | 5′-ACTTCGTTACAGAGTCCAGGGG-3′ | 699 |
| TTV | | |
| Forward Primer | 5′-AGCAACAGGTAATGGAGGAC-3′ | 700 |
| Reverse Primer | 5′-TGGAAGCTGGGGTCTTTAAC-3′ | 701 |
| Probe | 5′-TCTACCTTAGGTGCAAAGGGCC-3′ | 702 |

[0700] As a first step in the development process, qPCR is run using the TTV and TTMV primers with SYBR-green chemistry to check for primer specificity. FIG. 13 shows one distinct amplification peak for each primer pair.

[0701] Hydrolysis probes were ordered labeled with the fluorophore 6FAM at the 5′ end and a minor groove binding, non-fluorescent quencher (MGBNFQ) at the 3′ end. The PCR efficiency of the new primers and probes was then evaluated using two different commercial master mixes using purified plasmid DNA as component of a standard curve and increasing concentrations of primers. The standard curve was set up by using purified plasmids containing the target sequences for the different sets of primers-probes. Seven tenfold serial dilutions were performed to achieve a linear range over 7 logs and a lower limit of quantification of 15 copies per 20u1 reaction. Master mix #2 was capable of generating a PCR efficiency between 90-110%, values that are acceptable for quantitative PCR (FIG. 14). All primers for qPCR were ordered from IDT. Hydrolysis probes conjugated to the fluorophore 6FAM and a minor groove binding, non-fluorescent quencher (MGBNFQ) as well as all the qPCR master mixes were obtained from Thermo Fisher. An exemplary amplification plot is shown in FIG. 15.

[0702] Using these primer-probe sets and reagents, the genome equivalent (GEq)/ml in curon stocks was quantified. The linear range was between 1.5E+07-15 GEq per 20 ul reaction, which was then used to calculate the GEq/ml, as shown in FIGS. 16A-16B. Samples with higher concentrations than the linear range can be diluted as needed.

### Example 19: Utilizing Curons to Express an Exogenous Protein in Mice

[0703] This example describes the usage of a curon in which the Torque Teno Mini Virus (TTMV) genome is engineered to express the firefly luciferase protein in mice.

[0704] The plasmid encoding the DNA sequence of the engineered TTMV encoding the firefly-luciferase gene is introduced into A549 cells (human lung carcinoma cell line) by chemical transfection. 18 ug of plasmid DNA is used for transfection of 70% confluent cells in a 10 cm tissue culture plate. Empty vector backbone lacking the TTMV sequences is used as a negative control. Five hours post-transfection, cells are washed with PBS twice and are allowed to grow in fresh growth medium at 37° C. and 5% carbon dioxide.

[0705] Transfected A549 cells, along with their supernatant, are harvested 96 hours post transfection. Harvested material is treated with 0.5% deoxycholate (weight in volume) at 37° C. for 1 hour followed by endonuclease treatment. Curon particles are purified from this lysate using ion exchange chromatography. To determine curon concentration, a sample of the curon stock is run through a viral DNA purification kit and genome equivalents per ml are measured by qPCR using primers and probes targeted towards the curon DNA sequence.

[0706] A dose-range of genome equivalents of curons in 1× phosphate-buffered saline is performed via a variety of routes of injection (e.g. intravenous, intraperitoneal, subcutaneous, intramuscular) in mice at 8-10 weeks of age. Ventral and dorsal bioluminescence imaging is performed on each animal at 3, 7, 10 and 15 days post injection. Imaging is performed by adding the luciferase substrate (Perkin-Elmer) to each animal intraperitoneally at indicated time points, according to the manufacturer's protocol, followed by intravital imaging.

### Example 20: Genome Alignments to Determine Whether Curon DNA Integrated into Host Genomes

[0707] This example describes the computational analysis performed to determine whether curon DNA can integrate into the host genome, by examining whether Torque Teno Virus (TTV) has integrated into the human genome.

[0708] The complete genomes of one representative TTV sequence from each of clades 1-5 were aligned against the human genome sequence using the Basic Local Alignment Search Tool (BLAST) that finds regions of local similarity between sequences. The representative TTV sequences shown in Table 24 were analyzed:

TABLE 24
Representative TTV sequences

| TTV Clade | NCBI Accession No. |
|---|---|
| Clade 1 | AB064597.1 |
| Clade 2 | AB028669.1 |
| Clade 3 | AJ20231.1 |
| Clade 4 | AF122914.3 |
| Clade 5 | AF298585.1 |

Sequences from none of the aligned TTVs were found to have any significant similarity to the human genome, indicating that the TTVs have not integrated into the human genome.

### Example 21: Assessment of Curon Integration into a Host Genome

[0709] In this example, A549 cells (human lung carcinoma cell line) and HEK293T cells (human embryonic kidney cell line) are infected with either curon particles or AAV particles at MOIs of 5, 10, 30 or 50. The cells are washed with PBS 5 hours post infection and replaced with fresh growth medium. The cells are then allowed to grow at 37 degrees and 5% carbon dioxide. Cells are harvested five days post infection and they are processed to harvest genomic DNA, using the genomic DNA extraction kit (Qiagen). Genomic DNA is also harvested from uninfected cells (negative control). Whole-genome sequencing libraries are prepared for these harvested DNAs, using the Nextera DNA library preparation kit (Illumina), according to manufacturers protocol. The DNA libraries are sequenced using the NextSeq 550 system (Illumina) according to manufacturer's protocol. Sequencing data is assembled to the reference genome and analyzed to look for junctions between curon or AAV genomes and host genome. In cases where junctions are detected they are verified in the original genomic DNA sample prior sequencing library preparation by PCR. Primers are designed to amplify the region containing and around the junctions. The frequency of integration of Curons into the host genome is determined by quantifying the number of junctions (representing integration events) and the total number of curon copies in the sample by qPCR. This ratio can be compared to that of AAV.

### Example 22: Functional Effects of a Curon Expressing an Exogenous microRNA Sequence

[0710] This example provides a successful demonstration of function of curons expressing exogenous microRNA (miRNA) sequences.

[0711] Curon DNA sequences were generated that contained one of the following exogenous microRNA sequences in the 3′ non-coding region (NCR):
[0712] 1) miR-124
[0713] 2) miR-518
[0714] 3) miR-625
[0715] 4) Non-targeting scramble miRNA (miR-scr)

[0716] This was done by replacing the pre-miRNA sequence of the tth8-T1 miRNA of TTV-tth8 with the pre-miRNA sequences of the miRNAs mentioned above. Curon DNAs were then transfected into HEK293T cells seperately. Transfected 293T cells, along with the supernatants were harvested 96 hours post transfection. Harvested material was treated with 0.5% deoxycholate (weight in volume) at 37 degrees Celsius, followed by endonuclease treatment. This lysate containing the packaged curons (P0 stock of curons) were used to infect new 293T cells. These cells were harvested 96 hours, post infection. The harvested cells were then treated with 0.5% deoxycholate (weight in volume) at 37 degrees Celsius, followed by endonuclease treatment. This lysate was then dialyzed in the 10K molecular-weight cutoff dialysis cassettes in PBS at 4 degrees overnight to remove any deoxycholate. The titer of the curon was quantified in these dialyzed lysate (P1 stock of curon) using qPCR. P1 stock of curons were then incubated with several KRAS mutant non-small cell lung cancer (NSCLC) cell lines (SW900, NCI-H460, and A549) for 3 days at a titer of 274 genome equivalents per cell. Cell viability was measured with an Alamar blue assay. As shown in FIG. 17A, curons expressing an exogenous miR-625 significantly inhibited cancer cell line viability in all three NSCLC cell lines as compared to cells infected with control curons expressing a scrambled non-targeted miRNA and uninfected cells.

[0717] Additionally, a YFP-reporter assay was used to determine the downregulation of the target by curon miRNA by site specific binding to its target site. A YFP reporter that has a specific binding sequence for miR-625 was generated and transfected into HEK293T cells. 24 hours after transfection, these HEK293T cells were infected with curons expressing either miR-625 or a non-specific miRNA (miR-124) at a titer of 2.4 genome equivalents per cell, and YFP fluorescence was then measured using flow cytometry. As shown in FIG. 17B, curons expressing miR-625 significantly downregulated YFP expression, whereas curons expressing the non-specific miRNA miR-124 did not affect YFP expression. These results show that the curon with miR-625 induced on-target downregulation of the YFP protein target.

[0718] The ability of curons expressing exogenous miRNAs to modulate host gene expression was also tested. SW-900 NSCLC cells were infected with Curons expressing either miR-518 or miR-625 or miR-scr at a dose of 10 genome equivalents per cell. Infected cells were harvested 72 hours post infection and total protein lysates were prepared Immunoblot analysis was performed on these protein lysates to determine the levels of p65 protein. The intensity of p65 protein signal was normalized to the total amount of protein on the membrane for each sample (FIG. 17C). A reduction in p65 levels was observed, indicating that curons can modulate expression of a host gene.

### Example 23: Preparation and Production of Curons to Express Exogenous Non-Coding RNAs

[0719] This example describes the synthesis and production of curons to express exogenous small non-coding RNAs.

[0720] The DNA sequence from the tth8 strain of TTV (Jelcic et al, Journal of Virology, 2004) is synthesized and cloned into a vector containing the bacterial origin of replication and bacterial antibiotic resistance gene. In this vector, the DNA sequence encoding the TTV miRNA hairpin is replaced by a DNA sequence encoding an exogenous small non-coding RNA such as miRNA or shRNA. The engineered construct is then transformed into electro-competent bacteria, followed by plasmid isolation using a plasmid purification kit according to the manufacturer's protocols.

[0721] The curon DNA encoding the exogenous small non-coding RNAs is transfected into an eukaryotic producer cell line to produce curon particles. The supernatant of the transfected cells containing the curon particles is harvested at different time points post transfection. Curon particles, either from the filtered supernatant or after purification, are used for downstream applications, e.g., as described herein.

### Example 24: Conservation in Anellovirus Clades

[0722] This example describes the identification of five clades within the alphatorquevirus genus. The average pairwise identity within each clade generally ranges from 66 to 90% (FIG. 18). Representative sequences between these clades showed 57.2% pairwise identity across the sequences (FIG. 19). The pairwise identity is lowest among the open reading frames (˜51.4%), and higher in the non-coding regions (69.5% in the 5′ NCR, 72.6% in the 3′ NCR) (FIG. 19). This suggests that DNA sequences or structures in the non-coding regions play important roles in viral replication.

[0723] The amino acid sequences of the putative proteins in alphatorquevirus were also compared. The DNA sequences showed approximately 49 to 54% pairwise identity, while the amino acid sequences showed approximately 29 to 36% pairwise identity (FIG. 20). Interestingly, the representative sequences from the alphatorquevirus clades are able to successfully replicate in vivo and are observed in the human population. This suggests that the amino acid sequences for anellovirus proteins can vary widely while retaining functionalities such as replication and packaging.

[0724] Anelloviruses were found to have regions of local high conservation in the non-coding regions. In the region downstream of the promoter is a 71-bp 5′ UTR conserved domain that has 96.6% pairwise identity across the five alphatorquevirus clades (FIG. 21). Downstream of the open reading frames in the 3′ non-coding region of alphatorqueviruses, there is a 307 bp region with 85.2% pairwise identity between the representative sequences (FIG. 19). Near the 3′ end of this 3′ conserved non-coding region is a highly conserved 51 bp sequence with 96.5% pairwise identity. Each Anellovirus studied in this analysis also includes a GC-rich region, with greater than 70% GC content (FIG. 22).

### Example 25: Expression of an Endogenous miRNA from a Curon and Deletion of the Endogenous miRNA

[0725] In one example, curons based on the TTV-tth8 strain were used to infect Raji B cells in culture. These curons comprised a sequence encoding the endogenous payload of the TTV-tth8 Anellovirus, which is a miRNA targeting the mRNA encoding n-myc interacting protein (NMI). NMI operates downstream of the JAK/STAT pathway to regulate the transcription of various intracellular signals, including interferon-stimulated genes, proliferation and growth genes, and mediators of the inflammatory response. As shown in FIG. 23A, curons were able to successfully infect Raji B cells. Infection of cells with curons comprising the miRNA against NMI resulted in successful knockdown of NMI compared to control cells infected with curons lacking the miRNA against NMI (FIG. 23B). Cells infected with curon comprising the miRNA against NMI showed a greater than 75% reduction in NMI protein levels compared to control cells. This example demonstrates that a curon with a native Anellovirus miRNA can knock down a target molecule in host cells.

[0726] In another example, the endogenous miRNA of an Anellovirus-based curon was deleted. The resultant curon (Δ miR) was then used to infect host cells. Infection rate was compared to that of corresponding curons in which the endogenous miRNA was retained. As shown in FIG. 24, curons in which the endogenous miRNA were deleted were still able to infect cells at levels comparable to those observed for curons in which the endogenous miRNA was still present. This example demonstrates that the endogenous miRNA of an Anellovirus-based curon can be mutated, or deleted entirely, and still generate infectious particles.

The application's sequence listing, which the Patent Office published only in electronic form, follows.

SEQUENCE LISTING (749 sequences)

SEQ ID NO: 1 - DNA, 3570 bp, Torque teno virus
attttgtgcagcccgccaattctcgttcaaacaggccaatcaggaggctctacgtacacttcctggggtgtgtcttcgaagagtatataagcagaggcggtgacgaatggtagagtttttcctggcccgtccgcggcgagagcgcgagcggagcgagcgatcgagcgtcccgtgggcgggtgccgtaggtgagtttacacaccgcagtcaaggggcaattcgggctcgggactggccgggctatgggcaagattcttaaaaaattcccccgatccctctgtcgccaggacataaaaacatgccgtggagaccgccggtgcatagtgtccaggggcgagaggatcagtggttcgcgagcttttttcacggccacgcttcattttgcggttgcggtgacgctgttggccatcttaatagcattgctcctcgctttcctcgcgccggtccaccaaggccccctccggggctagagcagcctaaccccccgcagcagggcccggccgggcccggagggccgcccgccatcttggcgctgccggctccgcccgcggagcctgacgacccgcagccacggcgtggtggtggggacggtggcgccgccgctggcgccgcaggcgaccgtggagaccgagactacgacgaagaagagctagacgagcttttccgcgccgccgccgaagacgatttgtaagtaggagatggcgccggccttacaggcgcaggaggagacgcgggcgacgcagacgcagacgcagacgcagacataagcccaccctagtactcagacagtggcaacctgacgttatcagacactgtaagataacaggacggatgcccctcattatctgtggaaaggggtccacccagttcaactacatcacccacgcggacgacatcacccccaggggagcctcctacgggggcaacttcacaaacatgactttctccctggaggcaatatacgaacagtttctgtaccacagaaacaggtggtcagcctccaaccacgacctcgaactctgcagatacaagggtaccaccctaaaactgtacaggcacccagatgtagactacatagtcacctacagcagaacgggaccctttgagatcagccacatgacctacctcagcactcacccccttctcatgctgctaaacaaacaccacatagtggtgcccagcctaaagactaagcccaggggcagaaaggccataaaagtcagaataagaccccccaaactcatgaacaacaagtggtacttcaccagagacttctgtaacataggcctcttccagctctgggccacaggcttagaactcagaaacccctggctcagaatgagcaccctgagcccctgcataggcttcaatgtccttaaaaacagcatttacacaaacctcagcaacctacctcagcacagagaagacagacttaacattattaacaacacattacacccacatgacataacaggaccaaacaataaaaaatggcagtacacatataccaaactcatggcccccatttactattcagcaaacagggccagcacctatgacttactacgagagtatggcctctacagtccatactacctaaaccccacaaggataaaccttgactggatgaccccctacacacacgtcaggtacaatccactagtagacaagggcttcggaaacagaatatacatacagtggtgctcagaggcagatgtaagctacaacaggactaaatccaagtgtctcttacaagacatgcccctgtttttcatgtgctatggctacatagactgggcaattaaaaacacaggggtctcctcactagcgagagacgccagaatctgcatcaggtgtccctacacagagccacagctggtgggctccacagaagacatagggttcgtacccatcacagagaccttcatgaggggcgacatgccggtacttgcaccatacataccgttgagctggttttgcaagtggtatcccaacatagctcaccagaaggaagtacttgaggcaatcatttcctgcagccccttcatgccccgtgaccagggcatgaacggttgggatattacaataggttacaaaatggacttcttatggggcggttcccctctcccctcacagccaatcgacgacccctgccagcagggaacccacccgattcccgaccccgataagcaccctcgcctcctacaagtgtcgaacccgaaactgctcggaccgaggacagtgttccacaagtgggacatcagacgtgggcagtttagcaaaagaagtattaaaagagtgtcagaatactcatcggatgatgaatctcttgcgccaggtctcccatcaaagcgaaacaagctcgactcggccttcagaggagaaaacccagagcaaaaagaatgctattctctcctcaaagcactcgaggaagaagagaccccagaagaagaagaaccagcaccccaagaaaaagcccagaaagaggagctactccaccagctccagctccagagacgccaccagcgagtcctcagacgagggctcaagctcgtctttacagacatcctccgactccgccagggagtccactggaaccccgagctcacatagagcccccaccttacataccagacctactttttcccaatactggtaaaaaaaaaaaattctctcccttcgactgggaaacggaggcccagctagcagggatattcaagcgtcctatgcgcttctatccctcagacacccctcactacccgtggttaccccccaagcgcgatatcccgaaaatatgtaacataaacttcaaaataaagctgcaagagtgagtgattcgaggccctcctctgttcacttagcggtgtctacctcttaaagtcaccaagcactccgagcgtcagcgaggagtgcgaccctccaccaaggggcaacttcctcggggtccggcgctacgcgcttcgcgctgcgccggacgcctcggacccccccccgacccgaatcgctcgcgcgattcggacctgcggcctcggggggggtcgggggctttactaaacagactccgagttgccactggactcaggagctgtgaatcagtaacgaaagtgagtggggccagacttcgccatagggcctttaacttggggtcgtctgtcggtggcttccgggtccgcctgggcgccgccattttagctttagacgccattttaggccctcgcgggcacccgtaggcgcgttttaatgacgtcacggcagccattttgtcgtgacgtttgagacacgtgatgggggcgtgcctaaacccggaagcatccctggtcacgtgactctgacgtcacggcggccattttgtgctgtccgccatcttgtgacttccttccgctttttcaaaaaaaaagaggaagtatgacagtagcggcgggggggcggccgcgttcgcgcgccgcccaccagggggtgctgcgcgcccccccccgcgcatgcgcggggcccccccccgggggggctccgcccccccggcccccccccgtgctaaacccaccgcgcatgcgcgaccacgcccccgccgcc

SEQ ID NO: 2 - protein, 130 aa, Torque teno virus
MPWRPPVHSVQGREDQWFASFFHGHASFCGCGDAVGHLNSIAPRFPRAGPPRPPPGLEQPNPPQQGPAGPGGPPAILALPAPPAEPDDPQPRRGGGDGGAAAGAAGDRGDRDYDEEELDELFRAAAEDDL

SEQ ID NO: 3 - protein, 303 aa, Torque teno virus
MPWRPPVHSVQGREDQWFASFFHGHASFCGCGDAVGHLNSIAPRFPRAGPPRPPPGLEQPNPPQQGPAGPGGPPAILALPAPPAEPDDPQPRRGGGDGGAAAGAAGDRGDRDYDEEELDELFRAAAEDDFQSTTPASREPTRFPTPISTLASYKCRTRNCSDRGQCSTSGTSDVGSLAKEVLKECQNTHRMMNLLRQVSHQSETSSTRPSEEKTQSKKNAILSSKHSRKKRPQKKKNQHPKKKPRKRSYSTSSSSRDATSESSDEGSSSSLQTSSDSARESTGTPSSHRAPTLHTRPTFSQYW

SEQ ID NO: 4 - protein, 293 aa, Torque teno virus
MPWRPPVHSVQGREDQWFASFFHGHASFCGCGDAVGHLNSIAPRFPRAGPPRPPPGLEQPNPPQQGPAGPGGPPAILALPAPPAEPDDPQPRRGGGDGGAAAGAAGDRGDRDYDEEELDELFRAAAEDDLSPIKAKQARLGLQRRKPRAKRMLFSPQSTRGRRDPRRRRTSTPRKSPERGATPPAPAPETPPASPQTRAQARLYRHPPTPPGSPLEPRAHIEPPPYIPDLLFPNTGKKKKFSPFDWETEAQLAGIFKRPMRFYPSDTPHYPWLPPKRDIPKICNINFKIKLQE

SEQ ID NO: 5 - protein, 180 aa, Torque teno virus
MPWRPPVHSVQGREDQWSPIKAKQARLGLQRRKPRAKRMLFSPQSTRGRRDPRRRRTSTPRKSPERGATPPAPAPETPPASPQTRAQARLYRHPPTPPGSPLEPRAHIEPPPYIPDLLFPNTGKKKKFSPFDWETEAQLAGIFKRPMRFYPSDTPHYPWLPPKRDIPKICNINFKIKLQE

SEQ ID NO: 6 - protein, 680 aa, Torque teno virus
TAWWWGRWRRRWRRRRPWRPRLRRRRARRAFPRRRRRRFVSRRWRRPYRRRRRRGRRRRRRRRRHKPTLVLRQWQPDVIRHCKITGRMPLIICGKGSTQFNYITHADDITPRGASYGGNFTNMTFSLEAIYEQFLYHRNRWSASNHDLELCRYKGTTLKLYRHPDVDYIVTYSRTGPFEISHMTYLSTHPLLMLLNKHHIVVPSLKTKPRGRKAIKVRIRPPKLMNNKWYFTRDFCNIGLFQLWATGLELRNPWLRMSTLSPCIGFNVLKNSIYTNLSNLPQHREDRLNIINNTLHPHDITGPNNKKWQYTYTKLMAPIYYSANRASTYDLLREYGLYSPYYLNPTRINLDWMTPYTHVRYNPLVDKGFGNRIYIQWCSEADVSYNRTKSKCLLQDMPLFFMCYGYIDWAIKNTGVSSLARDARICIRCPYTEPQLVGSTEDIGFVPITETFMRGDMPVLAPYIPLSWFCKWYPNIAHQKEVLEAIISCSPFMPRDQGMNGWDITIGYKMDFLWGGSPLPSQPIDDPCQQGTHPIPDPDKHPRLLQVSNPKLLGPRTVFHKWDIRRGQFSKRSIKRVSEYSSDDESLAPGLPSKRNKLDSAFRGENPEQKECYSLLKALEEEETPEEEEPAPQEKAQKEELLHQLQLQRRHQRVLRRGLKLVFTDILRLRQGVHWNPELT

SEQ ID NO: 7 - protein, 197 aa, Torque teno virus
TAWWWGRWRRRWRRRRPWRPRLRRRRARRAFPRRRRRRFPIDDPCQQGTHPIPDPDKHPRLLQVSNPKLLGPRTVFHKWDIRRGQFSKRSIKRVSEYSSDDESLAPGLPSKRNKLDSAFRGENPEQKECYSLLKALEEEETPEEEEPAPQEKAQKEELLHQLQLQRRHQRVLRRGLKLVFTDILRLRQGVHWNPELT

SEQ ID NO: 8 - protein, 145 aa, Torque teno virus
TAWWWGRWRRRWRRRRPWRPRLRRRRARRAFPRRRRRRFVSHQSETSSTRPSEEKTQSKKNAILSSKHSRKKRPQKKKNQHPKKKPRKRSYSTSSSSRDATSESSDEGSSSSLQTSSDSARESTGTPSSHRAPTLHTRPTFSQYW

SEQ ID NO: 9 - DNA, 3794 bp, Torque teno virus
cccgaagtccgtcactaaccacgtgactcctgtcgcccaatcagagtgtatgtcgtgcatttcctgggcatggtctacatcctgatataactaagtgcacttccgaatggctgagttttccacgcccgtccgcagcgagggagcgacggaggagctcccgagcgtcccgagggcgggtgccggaggtgagtttacacaccgcagtcaaggggcaattcgggctcgggactggccgggctatgggcaaggctcttagggtcttcattcttaatatgtttcttggcagagtttaccgccacaagaaaaggaaagtgctactgtccacactgcgagctccacaggcgtctcgcagggctatgagttggcgacccccggtacacgatgcacccggcatcgagcgcaattggtacgaggcctgtttcagagcccacgctggagcttgtggctgtggcaattttattatgcaccttaatcttttggctgggcgttatggttttactccggggtcagcgccgccaggtggtcctcctccgggcaccccgcagataaggagagccaggcctagtcccgccgcaccagagcagcccgctgccctaccatggcatggggatggtggagatggcggcgccgctggcccgccagacgctggaggagacgccgtcgccggcgccccgtacggagaacaagagctcgccgacctgctcgacgctatagaagacgacgaacagtaagaaccaggcgaaggcggtgggggcgcagacggtacagacggggctggagacgcaggacttatgtgagaaaggggcgacacagaaaaaagaaaaagagactgatactgagacagtggcaaccagccacaagacgcagatgtaccataactgggtacctgcccatagtgttctgcggccacactaggggcaataaaaactatgcactacactctgacgactacaccccccaaggacaaccatttggaggggctctaagcactacctcattctctttaaaagtactatttgaccagcatcagagaggactaaacaagtggtcttttccaaacgaccaactagacctcgccagatatagaggctgcaaatttatattttatagaacaaaacaaactgactgggtgggccagtatgacatatcagaaccctacaagctagacaaatacagctgccccaactatcaccctggaaacatgattaaggcaaagcacaaatttttaataccaagctatgacactaatcctagaggcagacaaaaaattatagttaaaattccccccccagacctctttgtagacaagtggtacactcaagaggatctgtgttccgttaatcttgtgtcacttgcggtttctgcggcttcctttctccacccattcggctcaccacaaactgacaacccttgctacaccttccaggtgttgaaagagttctactatcaggcaataggcttctctgcaagcacacaagcaatgacatcagtattagacacgctatacacacaaaacagttattgggaatctaatctaactcagttttatgtacttaatgcaaaaaaaggcagtgatacaacacagcctttaactagcaatatgccaactcgtgaagagtttatggcaaaaaaaaataccaattacaactggtatacatacaaggccgcgtcagtaaaaaataaactacatcaaatgagacaaacctattttgaggagttaacctctaaggggccacaaacaacaaaaagtgaggaaggctacagtcagcactggaccaccccctccacaaacgcctacgaatatcacttaggaatgtttagtgcaatatttctagccccagacaggccagtacctagatttccatgcgcctaccaagatgtaacttacaaccccttaatggacaaaggggtgggaaaccacatttggtttcagtacaacacaaaggcagacactcagctaatagtcacaggagggtcctgcaaagcacacatacaagacataccactgtgggcggccttctatggatacagtgactttatagagtcagaactaggcccctttgtagatgcagagacggtaggcttagtgtgtgtaatatgcccttatacaaaaccccccatgtacaacaagacaaaccccgccatgggctacgtgttctatgacagaaactttggtgacggaaaatggactgacggacggggcaaaatagagccctactggcaagttaggtggaggcccgaaatgcttttccaagaaactgtaatggcagacctagttcagactgggccctttagctacaaagacgaacttaaaaacagcaccctagtgtgcaagtacaaattctatttcacctggggaggtaacatgatgttccaacagacgatcaaaaacccgtgcaagacggacggacaacccaccgactccagtagacaccctagaggaatacaagtggcggacccggaacaaatgggaccccgctgggtgttccactcctttgactggcgaaggggctatcttagcgagaaagctctcaaacgcctgcaagaaaaacctcttgactatgacgaatattttacacaaccaaaaagacctagaatctttcctccaacagaatcagcagagggagagttccgagagcccgaaaaaggctcgtattcagaggaagaaaggtcgcaagcctctgccgaagagcagacgcaggaggcgacagtactcctcctcaagcgacgactcagagagcaacagcagctccagcagcagctccaattcctcacccgagaaatgttcaaaacgcaagcgggtctccacctaaaccctatgttattaaaccagcgataaaccaagtgtacctgtttccagagagggccccaaaaccccctcctagcagccaagactggcagcaggagtacgaggcctgcgcagcctgggacaggccccctagatacaatctgtcctctcctcctttctaccccagctgcccttcaaaattctgtgtaaaattcagccttggctttaaataaatggcaactttactgtgcaaggccgtgggagtttcactggtcggtgtctacctctaaaggtcactaagcactccgagcgttagcgaggagtgcgacccttccccctgactcaacttcttcggagccgcgcgctacgccttcggctgcgcgcggcacctcagacccccgctcgtgctgacacgctcgcgcgtgtcagaccacttcgggctcgcgggggtcgggaattttgctaaacagactccgagttgctcttggacactgagggggcatatcagtaacgaaagtgagtggggccagacttcgccataaggcctttatcttcttgccattggatagtatcgagggttgccataggcttcgacctccattttaggccttccggactacaaaaatggccgttttagtgacgtcacggccgccattttaagtaaggcggaagcagctcggcgtacacaaaatggcggcggagcacttccggcttgcccaaaatggtgggcaacttcttccgggtcaaaggtcacagctacgtcacaagtcacgtggggagggttggcgtttaacccggaagccaatcctcttacgtggcctgtcacgtgacttgtacgtcacgaccaccattttgttttacaaaatggccgacttccttcctcttttttaaaaataacggttcggcggcggcgcgcgcgctacgcgcgcgcgccggggggctgccgccccccccccgcgcatgcgcggggcccccccccgcggggggctccgccccccggcccccc

SEQ ID NO: 10 - protein, 124 aa, Torque teno virus
MSWRPPVHDAPGIERNWYEACFRAHAGACGCGNFIMHLNLLAGRYGFTPGSAPPGGPPPGTPQIRRARPSPAAPEQPAALPWHGDGGDGGAAGPPDAGGDAVAGAPYGEQELADLLDAIEDDEQ

SEQ ID NO: 11 - protein, 267 aa, Torque teno virus
MSWRPPVHDAPGIERNWYEACFRAHAGACGCGNFIMHLNLLAGRYGFTPGSAPPGGPPPGTPQIRRARPSPAAPEQPAALPWHGDGGDGGAAGPPDAGGDAVAGAPYGEQELADLLDAIEDDEQRSKTRARRTDNPPTPVDTLEEYKWRTRNKWDPAGCSTPLTGEGAILARKLSNACKKNLLTMTNILHNQKDLESFLQQNQQRESSESPKKARIQRKKGRKPLPKSRRRRRQYSSSSDDSESNSSSSSSSNSSPEKCSKRKRVST

SEQ ID NO: 12 - protein, 257 aa, Torque teno virus
MSWRPPVHDAPGIERNWYEACFRAHAGACGCGNFIMHLNLLAGRYGFTPGSAPPGGPPPGTPQIRRARPSPAAPEQPAALPWHGDGGDGGAAGPPDAGGDAVAGAPYGEQELADLLDAIEDDEHRGRVPRARKRLVFRGRKVASLCRRADAGGDSTPPQATTQRATAAPAAAPIPHPRNVQNASGSPPKPYVIKPAINQVYLFPERAPKPPPSSQDWQQEYEACAAWDRPPRYNLSSPPFYPSCPSKFCVKFSLGFK

SEQ ID NO: 13 - protein, 150 aa, Torque teno virus
MSWRPPVHDAPGIERNCRGRVPRARKRLVFRGRKVASLCRRADAGGDSTPPQATTQRATAAPAAAPIPHPRNVQNASGSPPKPYVIKPAINQVYLFPERAPKPPPSSQDWQQEYEACAAWDRPPRYNLSSPPFYPSCPSKFCVKFSLGFK

SEQ ID NO: 14 - protein, 746 aa, Torque teno virus
MAWGWWRWRRRWPARRWRRRRRRRPVRRTRARRPARRYRRRRTVRTRRRRWGRRRYRRGWRRRTYVRKGRHRKKKKRLILRQWQPATRRRCTITGYLPIVFCGHTRGNKNYALHSDDYTPQGQPFGGALSTTSFSLKVLFDQHQRGLNKWSFPNDQLDLARYRGCKFIFYRTKQTDWVGQYDISEPYKLDKYSCPNYHPGNMIKAKHKFLIPSYDTNPRGRQKIIVKIPPPDLFVDKWYTQEDLCSVNLVSLAVSAASFLHPFGSPQTDNPCYTFQVLKEFYYQAIGFSASTQAMTSVLDTLYTQNSYWESNLTQFYVLNAKKGSDTTQPLTSNMPTREEFMAKKNTNYNWYTYKAASVKNKLHQMRQTYFEELTSKGPQTTKSEEGYSQHWTTPSTNAYEYHLGMFSAIFLAPDRPVPRFPCAYQDVTYNPLMDKGVGNHIWFQYNTKADTQLIVTGGSCKAHIQDIPLWAAFYGYSDFIESELGPFVDAETVGLVCVICPYTKPPMYNKTNPAMGYVFYDRNFGDGKWTDGRGKIEPYWQVRWRPEMLFQETVMADLVQTGPFSYKDELKNSTLVCKYKFYFTWGGNMMFQQTIKNPCKTDGQPTDSSRHPRGIQVADPEQMGPRWVFHSFDWRRGYLSEKALKRLQEKPLDYDEYFTQPKRPRIFPPTESAEGEFREPEKGSYSEEERSQASAEEQTQEATVLLLKRRLREQQQLQQQLQFLTREMFKTQAGLHLNPMLLNQR

SEQ ID NO: 15 - protein, 195 aa, Torque teno virus
MAWGWWRWRRRWPARRWRRRRRRRPVRRTRARRPARRYRRRRTTIKNPCKTDGQPTDSSRHPRGIQVADPEQMGPRWVFHSFDWRRGYLSEKALKRLQEKPLDYDEYFTQPKRPRIFPPTESAEGEFREPEKGSYSEEERSQASAEEQTQEATVLLLKRRLREQQQLQQQLQFLTREMFKTQAGLHLNPMLLNQR

SEQ ID NO: 16 - protein, 107 aa, Torque teno virus
MAWGWWRWRRRWPARRWRRRRRRRPVRRTRARRPARRYRRRRTQRESSESPKKARIQRKKGRKPLPKSRRRRRQYSSSSDDSESNSSSSSSSNSSPEKCSKRKRVST

SEQ ID NO: 17 - DNA, 3753 bp, Torque teno virus
tgctacgtcactaacccacgtgtcctctacaggccaatcgcagtctatgtcgtgcacttcctgggcatggtctacataattatataaatgcttgcacttccgaatggctgagtttttgctgcccgtccgcggagaggagccacggcaggggatccgaacgtcctgagggcgggtgccggaggtgagtttacacaccgaagtcaaggggcaattcgggctcaggactggccgggctttgggcaaggctcttaaaaatgcacttttctcgaataagcagaaagaaaaggaaagtgctactgctttgcgtgccagcagctaagaaaaaaccaactgctatgagcttctggaaacctccggtacacaatgtcacggggatccaacgcatgtggtatgagtcctttcaccgtggccacgcttctttttgtggttgtgggaatcctatacttcacattactgcacttgctgaaacatatggccatccaacaggcccgagaccttctgggccaccgggagtagaccccaacccccacatccgtagagccaggcctgccccggccgctccggagccctcacaggttgattcgagaccagccctgacatggcatggggatggtggaagcgacggaggcgctggtggttccggaagcggtggacccgtggcagacttcgcagacgatggcctcgatcagctcgtcgccgccctagacgacgaagagtaaggaggcgcagacggtggaggagggggagacgaaaaacaaggacttacagacgcaggagacgctttagacgcaggggacgaaaagcaaaacttataataaaactgtggcaacctgcagtaattaaaagatgcagaataaagggatacataccactgattataagtgggaacggtacctttgccacaaactttaccagtcacataaatgacagaataatgaaaggccccttcgggggaggacacagcactatgaggttcagcctctacattttgtttgaggagcacctcagacacatgaacttctggaccagaagcaacgataacctagagctaaccagatacttgggggcttcagtaaaaatatacaggcacccagaccaagactttatagtaatatacaacagaagaacccctctaggaggcaacatctacacagcaccctctctacacccaggcaatgccattttagcaaaacacaaaatattagtaccaagtttacagacaagaccaaagggtagaaaagcaattagactaagaatagcaccccccacactctttacagacaagtggtactttcaaaaggacatagccgacctcacccttttcaacatcatggcagttgaggctgacttgcggtttccgttctgctcaccacaaactgacaacacttgcatcagcttccaggtccttagttccgtttacaacaactacctcagtattaatacctttaataatgacaactcagactcaaagttaaaagaatttttaaataaagcatttccaacaacaggcacaaaaggaacaagtttaaatgcactaaatacatttagaacagaaggatgcataagtcacccacaactaaaaaaaccaaacccacaaataaacaaaccattagagtcacaatactttgcacctttagatgccctctggggagaccccatatactataatgatctaaatgaaaacaaaagtttgaacgatatcattgagaaaatactaataaaaaacatgattacataccatgcaaaactaagagaatttccaaattcataccaaggaaacaaggccttttgccacctaacaggcatatacagcccaccatacctaaaccaaggcagaatatctccagaaatatttggactgtacacagaaataatttacaacccttacacagacaaaggaactggaaacaaagtatggatggacccactaactaaagagaacaacatatataaagaaggacagagcaaatgcctactgactgacatgcccctatggactttactttttggatatacagactggtgtaaaaaggacactaataactgggacttaccactaaactacagactagtactaatatgcccttatacctttccaaaattgtacaatgaaaaagtaaaagactatgggtacatcccgtactcctacaaattcggagcgggtcagatgccagacggcagcaactacataccctttcagtttagagcaaagtggtaccccacagtactacaccagcaacaggtaatggaggacataagcaggagcgggccctttgcacctaaggtagaaaaaccaagcactcagctggtaatgaagtactgttttaactttaactggggcggtaaccctatcattgaacagattgttaaagaccccagcttccagcccacctatgaaatacccggtaccggtaacatccctagaagaatacaagtcatcgacccgcgggtcctgggaccgcactactcgttccggtcatgggacatgcgcagacacacatttagcagagcaagtattaagagagtgtcagaacaacaagaaacttctgaccttgtattctcaggcccaaaaaagcctcgggtcgacatcccaaaacaagaaacccaagaagaaagctcacattcactccaaagagaatcgagaccgtgggagaccgaggaagaaagcgagacagaagccctctcgcaagagagccaagaggtccccttccaacagcagttgcagcagcagtaccaagagcagctcaagctcagacagggaatcaaagtcctcttcgagcagctcataaggacccaacaaggggtccatgtaaacccatgcctacggtaggtcccaggcagtggctgtttccagagagaaagccagccccagctcctagcagtggagactgggccatggagtttctcgcagcaaaaatatttgataggccagttagaagcaaccttaaagataccccttactacccatatgttaaaaaccaatacaatgtctactttgaccttaaatttgaataaacagcagcttcaaacttgcaaggccgtgggagtttcactggtcggtgtctacctctaaaggtcactaagcactccgagcgtaagcgaggagtgcgaccctcccccctggaacaacttcttcggagtccggcgctacgccttcggctgcgccggacacctcagaccccccctccacccgaaacgcttgcgcgtttcggaccttcggcgtcgggggggtcgggagctttattaaacggactccgaagtgctcttggacactgagggggtgaacagcaacgaaagtgagtggggccagacttcgccataaggcctttatcttcttgccatttgtcagtgtccggggtcgccataggcttcgggctcgtttttaggccttccggactacaaaaatcgccattttggtgacgtcacggccgccatcttaagtagttgaggcggacggtggcgtgagttcaaaggtcaccatcagccacacctactcaaaatggtggacaatttcttccgggtcaaaggttacagccgccatgttaaaacacgtgacgtatgacgtcacggccgccattttgtgacacaagatggccgacttccttcctctttttcaaaaaaaagcggaagtgccgccgcggcggcggggggcggcgcgctgcgcgcgccgcccagtagggggagccatgcgcccccccccgcgcatgcgcggggcccccccccgcggggggctccgccccccggccccccccg

SEQ ID NO: 18 - protein, 127 aa, Torque teno virus
MSFWKPPVHNVTGIQRMWYESFHRGHASFCGCGNPILHITALAETYGHPTGPRPSGPPGVDPNPHIRRARPAPAAPEPSQVDSRPALTWHGDGGSDGGAGGSGSGGPVADFADDGLDQLVAALDDEE

SEQ ID NO: 19 - protein, 268 aa, Torque teno virus
MSFWKPPVHNVTGIQRMWYESFHRGHASFCGCGNPILHITALAETYGHPTGPRPSGPPGVDPNPHIRRARPAPAAPEPSQVDSRPALTWHGDGGSDGGAGGSGSGGPVADFADDGLDQLVAALDDEELLKTPASSPPMKYPVPVTSLEEYKSSTRGSWDRTTRSGHGTCADTHLAEQVLRECQNNKKLLTLYSQAQKSLGSTSQNKKPKKKAHIHSKENRDRGRPRKKARQKPSRKRAKRSPSNSSCSSSTKSSSSSDRESKSSSSSS

SEQ ID NO: 20 - protein, 276 aa, Torque teno virus
MSFWKPPVHNVTGIQRMWYESFHRGHASFCGCGNPILHITALAETYGHPTGPRPSGPPGVDPNPHIRRARPAPAAPEPSQVDSRPALTWHGDGGSDGGAGGSGSGGPVADFADDGLDQLVAALDDEEPKKASGRHPKTRNPRRKLTFTPKRIETVGDRGRKRDRSPLAREPRGPLPTAVAAAVPRAAQAQTGNQSPLRAAHKDPTRGPCKPMPTVGPRQWLFPERKPAPAPSSGDWAMEFLAAKIFDRPVRSNLKDTPYYPYVKNQYNVYFDLKFE

SEQ ID NO: 21 - protein, 167 aa, Torque teno virus
MSFWKPPVHNVTGIQRMWPKKASGRHPKTRNPRRKLTFTPKRIETVGDRGRKRDRSPLAREPRGPLPTAVAAAVPRAAQAQTGNQSPLRAAHKDPTRGPCKPMPTVGPRQWLFPERKPAPAPSSGDWAMEFLAAKIFDRPVRSNLKDTPYYPYVKNQYNVYFDLKFE

SEQ ID NO: 22 - protein, 743 aa, Torque teno virus
MAWGWWKRRRRWWFRKRWTRGRLRRRWPRSARRRPRRRRVRRRRRWRRGRRKTRTYRRRRRFRRRGRKAKLIIKLWQPAVIKRCRIKGYIPLIISGNGTFATNFTSHINDRIMKGPFGGGHSTMRFSLYILFEEHLRHMNFWTRSNDNLELTRYLGASVKIYRHPDQDFIVIYNRRTPLGGNIYTAPSLHPGNAILAKHKILVPSLQTRPKGRKAIRLRIAPPTLFTDKWYFQKDIADLTLFNIMAVEADLRFPFCSPQTDNTCISFQVLSSVYNNYLSINTFNNDNSDSKLKEFLNKAFPTTGTKGTSLNALNTFRTEGCISHPQLKKPNPQINKPLESQYFAPLDALWGDPIYYNDLNENKSLNDIIEKILIKNMITYHAKLREFPNSYQGNKAFCHLTGIYSPPYLNQGRISPEIFGLYTEIIYNPYTDKGTGNKVWMDPLTKENNIYKEGQSKCLLTDMPLWTLLFGYTDWCKKDTNNWDLPLNYRLVLICPYTFPKLYNEKVKDYGYIPYSYKFGAGQMPDGSNYIPFQFRAKWYPTVLHQQQVMEDISRSGPFAPKVEKPSTQLVMKYCFNFNWGGNPIIEQIVKDPSFQPTYEIPGTGNIPRRIQVIDPRVLGPHYSFRSWDMRRHTFSRASIKRVSEQQETSDLVFSGPKKPRVDIPKQETQEESSHSLQRESRPWETEEESETEALSQESQEVPFQQQLQQQYQEQLKLRQGIKVLFEQLIRTQQGVHVNPCLR

SEQ ID NO: 23 - protein, 194 aa, Torque teno virus
MAWGWWKRRRRWWFRKRWTRGRLRRRWPRSARRRPRRRRIVKDPSFQPTYEIPGTGNIPRRIQVIDPRVLGPHYSFRSWDMRRHTFSRASIKRVSEQQETSDLVFSGPKKPRVDIPKQETQEESSHSLQRESRPWETEEESETEALSQESQEVPFQQQLQQQYQEQLKLRQGIKVLFEQLIRTQQGVHVNPCLR

SEQ ID NO: 24 - protein, 113 aa, Torque teno virus
MAWGWWKRRRRWWFRKRWTRGRLRRRWPRSARRRPRRRRAQKSLGSTSQNKKPKKKAHIHSKENRDRGRPRKKARQKPSRKRAKRSPSNSSCSSSTKSSSSSDRESKSSSSSS

SEQ ID NO: 25 - DNA, 3853 bp, Torque teno virus
ggcttagtgcgtcaccacccacgtgacccgcctccgccaattaacaggtacttcgtacacttcctgggcgggcttataagactaatataagtagctgcacttccgaatggctgagttttccacgcccgtccgcagcggtgaagccacggagggagctcagcgcgtcccgagggcgggtgccggaggtgagtttacacaccgcagtcaaggggcaattcgggctcgggactggccgggctttgggcaaggctcttaaaaaagctatgtttattggcaggcactaccgaaagaaaagggcgctgctactgctatctgtgcattctacaaagacaaaagggaaacttctaatagctatgtggactcccccacgcaatgatcaacaataccttaactggcaatggtacacttctgtacttagctcccactctgctatgtgcgggtgttccgacgctatcgctcatcttaatcatcttgctaatctgcttcgtgccccgcaaaatccgcccccgcctgataatccaagacccctacccgtgcgagcactgcctgctcccccggctgcccacgaggcagccggtgatcgagcaccatggcctatgggtggtggaggagacgccggaggcgctggcgcaggtggagacgccgaccatggaggcgccgctggaggacccgcagacgcagacctgctagacgccgtggccgccgcagaaacgtaaggagacggcgcagagggaggtggagaaggaggtacaggaggtggaaaagaaagggcagacgtagaagaaaagcaaaaataataataagacagtggcagccaaactacagaagaagatgtaatatagtgggctacctccctatacttatctgtggtggaaatactgtttctagaaactatgccacacactcagacgatactaactatccaggaccctttgggggaggcatgaccacagacaaattcagccttagaatactatatgatgaatacaaaagatttatgaactactggacagcctcaaatgaggacctagatctctgtagatatctaggatgcactttttacttctttagacaccctgaagtagactttattataaaaataaacaccatgcccccattcttagatacaaccataacagcacctagcatacacccaggcctcatggccctagacaaaagagccagatggattccttctcttaaaaatagaccaggtaaaaaacactatataaaaattagagtaggggctcctaaaatgttcacagataaatggtaccctcaaacagacctctgtgacatgacactgctaactatctatgcaaccgcagcggatatgcaatatccgttcggctcaccactaactgacactgtggttgttaactcccaagttctgcaatccatgtatgatgaaacaattagcatattacctgatgaaaaaactaaaagaaatagccttcttacttctataagaagctacatacctttttataatactacacaaacaatagctcaattaaaaccatttgtagatgcaggaggacacacaacaggctcaacaacaactacatggggacaactattaaacacaactaaatttaccactaccacaacaaccacatacacataccctggcaccacaaatacagcagtaacatttataacagccaatgatacctggtacaggggaacagcatataaagataacattaaagatgtaccacaaaaagcagcacaattatactttcaaacaacacaaaaactactaggaaacacattccatggctcagatgaaacacttgaataccatgcaggcctatacagctctatctggctatcaccaggtagatcctactttgaaacaccaggtgcatacacagacattaaatataacccttttacagacagaggagaaggcaacatgctgtggatagactggctaagtaaaaaaaacatgaaatatgacaaagtgcaaagtaagtgcctagtagcagacctaccactgtgggcagcagcatatggttatgtagaattctgctctaaaagcacaggagacacaaacatacacatgaatgccagactactaataagaagtccttttacagacccccagctaatagtacacacagaccccactaaaggctttgtaccctattctttaaactttggaaatggtaaaatgccaggaggtagcagcaatgttcccataagaatgagagctaagtggtaccccactttatcccaccaacaagaagttctagaggccttagcacagtcaggaccctttgcttatcactcagacattaaaaaagtatctctaggcataaaataccgttttaagtggatctggggtggaaaccccgttcgccaacaggttgttagaaatccctgcaaggaaccccactcctcgggcaatagagtccctagaagcatacaaatcgttgacccgagatacaactcaccggaacttaccatccatgcctgggacttcagacgtggcttctttggcccgaaagctattcaaagaatgcaacaacaaccaactgctactgaatttttttcagcaggccgcaagagacccagaagggacacagaagtgtatcagtccgaccaagaaaaggagcaaaaagaaagctcgcttttccccccagtcaagctcctccgaagagtccccccgtgggaggactcggaacaggagcaaagcgggtcgcaaagctcagaggaagagacggcgaccctctcccagcagctcaaacagcagctgcagcagcagcgagtcttgggagtcaaactcagactcctgttcaaccaagtccaaaaaatccaacaaaatcaagatatcaaccctaccttgttaccaagggggggggatctagtatccttctttcaggctgtaccataaatatgtttccagaccctaaaccttactgcccctccagcaatgactggaaagaagagtatgaggcctgtaaatattgggatagacctcccagacacaaccttagagacccccccttttacccctgggcccctaaaaacaatccttgcaatgtaagctttaaacttggcttcaaataaactaggccgtgggagtttcacttgtcggtgtctacctctataagtcactaagcactccgagcgcagcgaggagtgcgacccttccccctggtgcaacgccctcggcggccgcgcgctacgccttcggctgcgcgcggcacctcggacccccgctcgtgctgacacgcttgcgcgtgtcagaccacttcgggctcgcgggggtcgggaaatttgctaaacagactccgagttgccattggacactgtagctatgaatcagtaacgaaagtgagtggggccagacttcgccataaggcctttatcttcttgccatttgtcagtattgggggtcgccataaactttgggctccattttaggccttccggactacaaaaatcgccatatttgtgacgtcagagccgccattttaagtcagctctggggaggcgtgacttccagttcaaaggtcatcctcaccataactggcacaaaatggccgccaacttcttccgggtcaaaggtcactgctacgtcataggtgacgtggggggggacctacttaaacacggaagtaggccccgacacgtcactgtcacgtgacagtacgtcacagccgccattttgttttacaaaatagccgacttccttcctcttttttaaaaaaaggcgccaaaaaaccgtcggcgggggggccgcgcgctgcgcgcgcggcccccgggggaggcacagcctcccccccccgcgcgcatgcgcgcgggtccccccccctccggggggctccgccccccggcccccccc

SEQ ID NO: 26 - protein, 120 aa, Torque teno virus
MWTPPRNDQQYLNWQWYTSVLSSHSAMCGCSDAIAHLNHLANLLRAPQNPPPPDNPRPLPVRALPAPPAAHEAAGDRAPWPMGGGGDAGGAGAGGDADHGGAAGGPADADLLDAVAAAET

SEQ ID NO: 27 - protein, 286 aa, Torque teno virus
MWTPPRNDQQYLNWQWYTSVLSSHSAMCGCSDAIAHLNHLANLLRAPQNPPPPDNPRPLPVRALPAPPAAHEAAGDRAPWPMGGGGDAGGAGAGGDADHGGAAGGPADADLLDAVAAAETLLEIPARNPTPRAIESLEAYKSLTRDTTHRNLPSMPGTSDVASLARKLFKECNNNQLLLNFFQQAARDPEGTQKCISPTKKRSKKKARFSPQSSSSEESPRGRTRNRSKAGRKAQRKRRRPSPSSSNSSCSSSESWESNSDSCSTKSKKSNKIKISTLPCYQGGGI

SEQ ID NO: 28 - protein, 289 aa, Torque teno virus
MWTPPRNDQQYLNWQWYTSVLSSHSAMCGCSDAIAHLNHLANLLRAPQNPPPPDNPRPLPVRALPAPPAAHEAAGDRAPWPMGGGGDAGGAGAGGDADHGGAAGGPADADLLDAVAAAETPQETQKGHRSVSVRPRKGAKRKLAFPPSQAPPKSPPVGGLGTGAKRVAKLRGRDGDPLPAAQTAAAAAASLGSQTQTPVQPSPKNPTKSRYQPYLVTKGGGSSILLSGCTINMFPDPKPYCPSSNDWKEEYEACKYWDRPPRHNLRDPPFYPWAPKNNPCNVSFKLGFK

SEQ ID NO: 29 - protein, 185 aa, Torque teno virus
MWTPPRNDQQYLNWQWPQETQKGHRSVSVRPRKGAKRKLAFPPSQAPPKSPPVGGLGTGAKRVAKLRGRDGDPLPAAQTAAAAAASLGSQTQTPVQPSPKNPTKSRYQPYLVTKGGGSSILLSGCTINMFPDPKPYCPSSNDWKEEYEACKYWDRPPRHNLRDPPFYPWAPKNNPCNVSFKLGFK

SEQ ID NO: 30 - protein, 769 aa, Torque teno virus
MAYGWWRRRRRRWRRWRRRPWRRRWRTRRRRPARRRGRRRNVRRRRRGRWRRRYRRWKRKGRRRRKAKIIIRQWQPNYRRRCNIVGYLPILICGGNTVSRNYATHSDDTNYPGPFGGGMTTDKFSLRILYDEYKRFMNYWTASNEDLDLCRYLGCTFYFFRHPEVDFIIKINTMPPFLDTTITAPSIHPGLMALDKRARWIPSLKNRPGKKHYIKIRVGAPKMFTDKWYPQTDLCDMTLLTIYATAADMQYPFGSPLTDTVVVNSQVLQSMYDETISILPDEKTKRNSLLTSIRSYIPFYNTTQTIAQLKPFVDAGGHTTGSTTTTWGQLLNTTKFTTTTTTTYTYPGTTNTAVTFITANDTWYRGTAYKDNIKDVPQKAAQLYFQTTQKLLGNTFHGSDETLEYHAGLYSSIWLSPGRSYFETPGAYTDIKYNPFTDRGEGNMLWIDWLSKKNMKYDKVQSKCLVADLPLWAAAYGYVEFCSKSTGDTNIHMNARLLIRSPFTDPQLIVHTDPTKGFVPYSLNFGNGKMPGGSSNVPIRMRAKWYPTLSHQQEVLEALAQSGPFAYHSDIKKVSLGIKYRFKWIWGGNPVRQQVVRNPCKEPHSSGNRVPRSIQIVDPRYNSPELTIHAWDFRRGFFGPKAIQRMQQQPTATEFFSAGRKRPRRDTEVYQSDQEKEQKESSLFPPVKLLRRVPPWEDSEQEQSGSQSSEEETATLSQQLKQQLQQQRVLGVKLRLLFNQVQKIQQNQDINPTLLPRGGDLVSFFQAVP

SEQ ID NO: 31 - protein, 216 aa, Torque teno virus
MAYGWWRRRRRRWRRWRRRPWRRRWRTRRRRPARRRGRRRNVVRNPCKEPHSSGNRVPRSIQIVDPRYNSPELTIHAWDFRRGFFGPKAIQRMQQQPTATEFFSAGRKRPRRDTEVYQSDQEKEQKESSLFPPVKLLRRVPPWEDSEQEQSGSQSSEEETATLSQQLKQQLQQQRVLGVKLRLLFNQVQKIQQNQDINPTLLPRGGDLVSFFQAVP

SEQ ID NO: 32 - protein, 143 aa, Torque teno virus
MAYGWWRRRRRRWRRWRRRPWRRRWRTRRRRPARRRGRRRNAARDPEGTQKCISPTKKRSKKKARFSPQSSSSEESPRGRTRNRSKAGRKAQRKRRRPSPSSSNSSCSSSESWESNSDSCSTKSKKSNKIKISTLPCYQGGGI

SEQ ID NO: 33 - DNA, 3758 bp, Torque teno virus
aaagtacgtcactaaccacgtgactcccacaggccaaccacagtctacgtcgtgcatttcctgggcatggtctacatcataatataagaaggcgcacttccgaatggctgagttttccacgcccgtccgcagcgagaacgccacggagggagatcctcgcgtcccgagggcgggtgccggaggtgagtttacacaccgcagtcaaggggcaattcgggctcgggactggccgggccctgggcaaggctcttaaaaaatgcgctttcgcagggttgcggagaaaaggaaagtgcttctgcaaactctgcgagctgcaaagcaggctaggcggcttctaggtatgtggcagccccccgcgcacaatgtccccggcatcgagagaaactggtacgagagctgcttcaggtctcacgctgctgtttgtggctgtggcgactttgttggccatattaatcatttggcaactactctgggtcgtcctccgcgtcctgggcccccaggcggaccccgcacgccgcaaataagaaacctgccagcgctcccggcgccccagggcgagcccggtgacagagcgccatggcgtggggtttctggggccgacgccgccggtggagacggtggagagcgcggcgcagacggtggagaccccggagacgtaggagacgacgccctgctcgccgctttcgagctcgtcgaagagtaaggagacgcggggggaggtggcgcagacgctacagaaaatggcgacggggcagacgcagacggactcacagaaaaaagataattataaaacagtggcaaccaaactttattagacgctgctacataataggatgcctacctctcgttttctgtggcgaaaatacaaccgcccagaactatgccactcactcagacgatatgataagcaaaggaccgtacggggggggcatgactaccacgaaattcactctgagaatactgtacgacgagtttaccaggtttatgaacttttggactgtcagtaacgaagacctagacctgtgtagatacgtgggctgcaaactgatattttttaaacaccccacggtggactttatggtacagataaacactcagcctcctttcttagacacaagcctcaccgcggccagcatacacccgggcatcatgatgctcagcaagagacgcatattaataccctctctaaagacccggccgagcagaaaacacagggtggtcgtcagggtgggcgccccaagactttttcaggacaagtggtacccccagtcagacctatgtgacacagttctgctttccatatttgcaaccgcccgcgacttgcaatatccgttcggctcaccactaactgacaacccttgcgtcaacttccagatcctggggccccagtacaaaaaacaccttagtattagctccactatggatgatactaacaaacagcactataacagcaacttatttaataaaactgcactatacaacacctttcaaaccatagcccggcttaaagagacaggacaaactgcaaacattagtccaagttggagtgaagtacaaaacacaaaactactagatcacacaggtgctaatgcaactgccagcagagacacttggtacaagggaaacacatacaatgactacatacaacagttagcagagaaaacaagagaaaggtttaaaaaagcaacaatgtcagcactaccaaactaccccacaataatgtccacagacttatacgaataccactcaggcatatactccagcatatttctatcagctggcaggagctactttgaaaccactggggcctactctgacattatatacaaccctttgacagacaaaggcacaggcaacataatctggatagactaccttacaaaagacgacacaatctttgtaaaaaacaaaagcaaatgtgagataatggacatgcccctgtgggcggccggcacaggatacacagagttttgtgcaaagtacacaggagactctgccattatttacaatgccagaatactcataagatgcccatacactgaacccatgctaatagaccactcagacccaaacaaaggctttgtaccgtactcatttaactttggcaacggaaagatgccgggaggcagctccaacgtgcccataagaatgagagccaagtggtacgtaaacatattccaccaaaaagaagtattggagagcatagtacagtccggaccgttcgggtacaggggcgacataaaatcagctgtactgtccatgaaatacagatttcactggaaatggggcggaaaccctatatccaaacaggtcgtcaggaatccctgctccaactccagcacctccgcggcccatagaggacctcgcagcgtacaagcggttgacccgaaatacaataccccagaagtcacttggcactcgtgggacatcagacgaggactctttggcaaagcaggtattaaaagaatgcaacaagaatcagatgctctttacgttcctgcaggaccactcaagaggcctcgcagagacaccaacgcccaagacccggaaaagcaaaacgaaagctcacgtttcggagtccagcagcgactcccgtgggtccactccagccaagagacgcaaagctccgaagaagagacgcaggcgcaggggtcggtacaagaccaactactcctccagctccgagagcagcgagtactccgactccagctccaacaactcgcaccccaagtcctcaaagttcaagcaggacacagcctacaccccctattatcctcccaagcataaacaaagcctatatgtttgaaccccagggtcctaaacccatacaggggtacaacgattggctagaggagtacactagttgcaagttccgggacagacccccgagaatgctacacacagacttacccttttacccctgggcaccaaaaccccaagaccaagtcagggtaacctttaaactcaactttcaataaaaattctaggccgtgggactttcacttgtcggtgtctgcttcttaaggtcgccaagcactccgagcgtcagcgaggagtgcgaccccccccctcggtagcaacgccttcggagccgcgcgctacgccttcggctgcgcgcggcacctcagaccccccctccacccgaaacgcttgcgcgtttcggaccttcggcgtcgggggggtcgggagctttattaaacagactccgagttgccattggacactggagctgtgaatcagtaacgaaagtgagtggggccagacttcgccatagggcctttatcttctcgccattggatagtgtccggggttgccgtaggcttcggcctcgtttttaggccttccggactacaaaaatggcggattttgtgacgtcacggccgccattttaagtaaggcggaagcagctccaccctctcacataatggcggcggagcactcccggcttgcccaaaatggcgggcaagctcttccgggtcaaaggttggcagctacgtcacaagtcacctgactggggaggagttacatcccggaagttctcctcggtcacgtgactgtacacgtgactgctacgtcattgacgccatcttgtgtcacaaaatggcggtgcacttccgcttttttgaaaaaaggcgcgaaaaaacggcggcggcggcgcgcgcgctgcgcgcgcgcgccgggggggcgccagcgcccccccccccgcgcatgcacgggtccccccccccacggggggctccgccccccggccccccccc

SEQ ID NO: 34 - protein, 120 aa, Torque teno virus
MWQPPAHNVPGIERNWYESCFRSHAAVCGCGDFVGHINHLATTLGRPPRPGPPGGPRTPQIRNLPALPAPQGEPGDRAPWRGVSGADAAGGDGGERGADGGDPGDVGDDALLAAFELVEE

SEQ ID NO: 35 - protein, 284 aa, Torque teno virus
MWQPPAHNVPGIERNWYESCFRSHAAVCGCGDFVGHINHLATTLGRPPRPGPPGGPRTPQIRNLPALPAPQGEPGDRAPWRGVSGADAAGGDGGERGADGGDPGDVGDDALLAAFELVEESSGIPAPTPAPPRPIEDLAAYKRLTRNTIPQKSLGTRGTSDEDSLAKQVLKECNKNQMLFTFLQDHSRGLAETPTPKTRKSKTKAHVSESSSDSRGSTPAKRRKAPKKRRRRRGRYKTNYSSSSESSEYSDSSSNNSHPKSSKFKQDTAYTPYYPPKHKQSLYV

SEQ ID NO: 36 - protein, 277 aa, Torque teno virus
MWQPPAHNVPGIERNWYESCFRSHAAVCGCGDFVGHINHLATTLGRPPRPGPPGGPRTPQIRNLPALPAPQGEPGDRAPWRGVSGADAAGGDGGERGADGGDPGDVGDDALLAAFELVEETTQEASQRHQRPRPGKAKRKLTFRSPAATPVGPLQPRDAKLRRRDAGAGVGTRPTTPPAPRAASTPTPAPTTRTPSPQSSSRTQPTPPIILPSINKAYMFEPQGPKPIQGYNDWLEEYTSCKFRDRPPRMLHTDLPFYPWAPKPQDQVRVTFKLNFQ

SEQ ID NO: 37 - protein, 173 aa, Torque teno virus
MWQPPAHNVPGIERNWTTQEASQRHQRPRPGKAKRKLTFRSPAATPVGPLQPRDAKLRRRDAGAGVGTRPTTPPAPRAASTPTPAPTTRTPSPQSSSRTQPTPPIILPSINKAYMFEPQGPKPIQGYNDWLEEYTSCKFRDRPPRMLHTDLPFYPWAPKPQDQVRVTFKLNFQ

SEQ ID NO: 38 - protein, 736 aa, Torque teno virus
MAWGFWGRRRRWRRWRARRRRWRPRRRRRRRPARRFRARRRVRRRGGRWRRRYRKWRRGRRRRTHRKKIIIKQWQPNFIRRCYIIGCLPLVFCGENTTAQNYATHSDDMISKGPYGGGMTTTKFTLRILYDEFTRFMNFWTVSNEDLDLCRYVGCKLIFFKHPTVDFMVQINTQPPFLDTSLTAASIHPGIMMLSKRRILIPSLKTRPSRKHRVVVRVGAPRLFQDKWYPQSDLCDTVLLSIFATARDLQYPFGSPLTDNPCVNFQILGPQYKKHLSISSTMDDTNKQHYNSNLFNKTALYNTFQTIARLKETGQTANISPSWSEVQNTKLLDHTGANATASRDTWYKGNTYNDYIQQLAEKTRERFKKATMSALPNYPTIMSTDLYEYHSGIYSSIFLSAGRSYFETTGAYSDIIYNPLTDKGTGNIIWIDYLTKDDTIFVKNKSKCEIMDMPLWAAGTGYTEFCAKYTGDSAIIYNARILIRCPYTEPMLIDHSDPNKGFVPYSFNFGNGKMPGGSSNVPIRMRAKWYVNIFHQKEVLESIVQSGPFGYRGDIKSAVLSMKYRFHWKWGGNPISKQVVRNPCSNSSTSAAHRGPRSVQAVDPKYNTPEVTWHSWDIRRGLFGKAGIKRMQQESDALYVPAGPLKRPRRDTNAQDPEKQNESSRFGVQQRLPWVHSSQETQSSEEETQAQGSVQDQLLLQLREQRVLRLQLQQLAPQVLKVQAGHSLHPLLSSQA

SEQ ID NO: 39 - protein, 199 aa, Torque teno virus
MAWGFWGRRRRWRRWRARRRRWRPRRRRRRRPARRFRARRRVVRNPCSNSSTSAAHRGPRSVQAVDPKYNTPEVTWHSWDIRRGLFGKAGIKRMQQESDALYVPAGPLKRPRRDTNAQDPEKQNESSRFGVQQRLPWVHSSQETQSSEEETQAQGSVQDQLLLQLREQRVLRLQLQQLAPQVLKVQAGHSLHPLLSSQA

SEQ ID NO: 40 - protein, 141 aa, Torque teno virus
MAWGFWGRRRRWRRWRARRRRWRPRRRRRRRPARRFRARRRDHSRGLAETPTPKTRKSKTKAHVSESSSDSRGSTPAKRRKAPKKRRRRRGRYKTNYSSSSESSEYSDSSSNNSHPKSSKFKQDTAYTPYYPPKHKQSLYV

SEQ ID NO: 41 - DNA, 2979 bp, TTV-like mini virus
taataaatattcaacaggaaaaccacctaatttaaattgccgaccacaaaccgtcacttagttcccctttttgcaacaacttctgcttttttccaactgccggaaaaccacataatttgcatggctaaccacaaactgatatgctaattaacttccacaaaacaacttccccttttaaaaccacacctacaaattaattattaaacacagtcacatcctgggaggtactaccacactataataccaagtgcacttccgaatggctgagtttatgccgctagacggagaacgcatcagttactgactgcggactgaacttgggcgggtgccgaaggtgagtgaaaccaccgaagtcaaggggcaattcgggctagttcagtctagcggaacgggcaagaaacttaaaattattttatttttcagatgagcgactgctttaaaccaacatgctacaacaacaaaacaaagcaaactcactggattaataacctgcatttaacccacgacctgatctgcttctgcccaacaccaactagacacttattactagctttagcagaacaacaagaaacaattgaagtgtctaaacaagaaaaagaaaaaataacaagatgccttattactacagaagaagacggtacaactacagacgtcctagatggtatggacgaggttggattagacgcccttttcgcagaagatttcgaagaaaaagaagggtaagacctacttatactactattcctctaaagcaatggcaaccgccatataaaagaacatgctatataaaaggacaagactgtttaatatactatagcaacttaagactgggaatgaatagtacaatgtatgaaaaaagtattgtacctgtacattggccgggagggggttctttttctgtaagcatgttaactttagatgccttgtatgatatacataaactttgtagaaactggtggacatccacaaaccaagacttaccactagtaagatataaaggatgcaaaataacattttatcaaagcacatttacagactacatagtaagaatacatacagaactaccagctaacagtaacaaactaacatacccaaacacacatccactaatgatgatgatgtctaagtacaaacacattatacctagtagacaaacaagaagaaaaaagaaaccatacacaaaaatatttgtaaaaccacctccgcaatttgaaaacaaatggtactttgctacagacctctacaaaattccattactacaaatacactgcacagcatgcaacttacaaaacccatttgtaaaaccagacaaattatcaaacaatgttacattatggtcactaaacaccataagcatacaaaatagaaacatgtcagtggatcaaggacaatcatggccatttaaaatactaggaacacaaagcttttatttttacttttacaccggagcaaacctaccaggtgacacaacacaaataccagtagcagacctattaccactaacaaacccaagaataaacagaccaggacaatcactaaatgaggcaaaaattacagaccatattactttcacagaatacaaaaacaaatttacaaattattggggtaacccatttaataaacacattcaagaacacctagatatgatactatactcactaaaaagtccagaagcaataaaaaacgaatggacaacagaaaacatgaaatggaaccaattaaacaatgcaggaacaatggcattaacaccatttaacgagccaatattcacacaaatacaatataacccagatagagacacaggagaagacactcaattatacctactctctaacgctacaggaacaggatgggacccaccaggaattccagaattaatactagaaggatttccactatggttaatatattggggatttgcagactttcaaaaaaacctaaaaaaagtaacaaacatagacacaaattacatgttagtagcaaaaacaaaatttacacaaaaacctggcacattctacttagtaatactaaatgacacctttgtagaaggcaatagcccatatgaaaaacaacctttacctgaagacaacattaaatggtacccacaagtacaataccaattagaagcacaaaacaaactactacaaactgggccatttacaccaaacatacaaggacaactatcagacaatatatcaatgttttataaattttactttaaatggggaggaagcccaccaaaagcaattaatgttgaaaatcctgcccaccagattcaatatcccataccccgtaacgagcatgaaacaacttcgttacagagtccaggggaagccccagaatccatcttatactccttcgactatagacacgggaactacacaacaacagctttgtcacgaattagccaagactgggcacttaaagacactgtttctaaaattacagagccagatcgacagcaactgctcaaacaagccctcgaatgcctgcaaatctcggaagaaacgcaggagaaaaaagaaaaagaagtacagcagctcatcagcaacctcagacagcagcagcagctgtacagagagcgaataatatcattattaaaggaccaataacttttaactgtgtaaaaaaggtgaaattgtttgatgataaaccaaaaaaccgtagatttacacctgaggaatttgaaactgagttacaaatagcaaaatggttaaagagacccccaagatcctttgtaaatgatcctcccttttacccatggttaccacctgaacctgttgtaaactttaagcttaattttactgaataaaggccagcattaattcacttaaggagtctgtttatttaagttaaaccttaataaacggtcaccgcctccctaatacgcaggcgcagaaagggggctccgccccctttaacccccagggggctccgccccctgaaacccccaagggggctacgcccccttacaccccc

SEQ ID NO: 42 - protein, 99 aa, TTV-like mini virus
MSDCFKPTCYNNKTKQTHWINNLHLTHDLICFCPTPTRHLLLALAEQQETIEVSKQEKEKITRCLITTEEDGTTTDVLDGMDEVGLDALFAEDFEEKEG

SEQ ID NO: 43 - protein, 203 aa, TTV-like mini virus
MSDCFKPTCYNNKTKQTHWINNLHLTHDLICFCPTPTRHLLLALAEQQETIEVSKQEKEKITRCLITTEEDGTTTDVLDGMDEVGLDALFAEDFEEKEGFNIPYPVTSMKQLRYRVQGKPQNPSYTPSTIDTGTTQQQLCHELAKTGHLKTLFLKLQSQIDSNCSNKPSNACKSRKKRRRKKKKKYSSSSATSDSSSSCTESE

SEQ ID NO: 44 - protein, 219 aa, TTV-like mini virus
MSDCFKPTCYNNKTKQTHWINNLHLTHDLICFCPTPTRHLLLALAEQQETIEVSKQEKEKITRCLITTEEDGTTTDVLDGMDEVGLDALFAEDFEEKEGARSTATAQTSPRMPANLGRNAGEKRKRSTAAHQQPQTAAAAVQRANNIIIKGPITFNCVKKVKLFDDKPKNRRFTPEEFETELQIAKWLKRPPRSFVNDPPFYPWLPPEPVVNFKLNFTE

SEQ ID NO: 45 - protein, 666 aa, TTV-like mini virus
MPYYYRRRRYNYRRPRWYGRGWIRRPFRRRFRRKRRVRPTYTTIPLKQWQPPYKRTCYIKGQDCLIYYSNLRLGMNSTMYEKSIVPVHWPGGGSFSVSMLTLDALYDIHKLCRNWWTSTNQDLPLVRYKGCKITFYQSTFTDYIVRIHTELPANSNKLTYPNTHPLMMMMSKYKHIIPSRQTRRKKKPYTKIFVKPPPQFENKWYFATDLYKIPLLQIHCTACNLQNPFVKPDKLSNNVTLWSLNTISIQNRNMSVDQGQSWPFKILGTQSFYFYFYTGANLPGDTTQIPVADLLPLTNPRINRPGQSLNEAKITDHITFTEYKNKFTNYWGNPFNKHIQEHLDMILYSLKSPEAIKNEWTTENMKWNQLNNAGTMALTPFNEPIFTQIQYNPDRDTGEDTQLYLLSNATGTGWDPPGIPELILEGFPLWLIYWGFADFQKNLKKVTNIDTNYMLVAKTKFTQKPGTFYLVILNDTFVEGNSPYEKQPLPEDNIKWYPQVQYQLEAQNKLLQTGPFTPNIQGQLSDNISMFYKFYFKWGGSPPKAINVENPAHQIQYPIPRNEHETTSLQSPGEAPESILYSFDYRHGNYTTTALSRISQDWALKDTVSKITEPDRQQLLKQALECLQISEETQEKKEKEVQQLISNLRQQQQLYRERIISLLKDQ

SEQ ID NO: 46 - protein, 148 aa, TTV-like mini virus
MPYYYRRRRYNYRRPRWYGRGWIRRPFRRRFRRKRRIQYPIPRNEHETTSLQSPGEAPESILYSFDYRHGNYTTTALSRISQDWALKDTVSKITEPDRQQLLKQALECLQISEETQEKKEKEVQQLISNLRQQQQLYRERIISLLKDQ

SEQ ID NO: 47 - protein, 82 aa, TTV-like mini virus
MPYYYRRRRYNYRRPRWYGRGWIRRPFRRRFRRKRRSQIDSNCSNKPSNACKSRKKRRRKKKKKYSSSSATSDSSSSCTESE

SEQ ID NO: 48 - DNA, 3242 bp, Torque teno midi virus 1
aggtggagactcttaagctatataaccaagtggggtggcgaatggctgagtttaccccgctagacggtgcagggaccggatcgagcgcagcgaggaggtccccggctgcccgtgggcgggagcccgaggtgagtgaaaccaccgaggtctaggggcaattcgggctagggcagtctagcggaacgggcaagaaacttaaaaatatttcttttacagatgcaaaacctatcagccaaagacttctacaaaccatgcagatacaactgtgaaactaaaaaccaaatgtggatgtctggcattgctgactcccatgacagttggtgtgactgtgatactccttttgctcacctcctggctagtatttttcctcctggtcacacagatcgcacacgaaccatccaagaaatacttaccagagattttaggaaaacatgcctttctggtggggccgacgcaacaaattctggtatggccgaaactatagaagaaaaaagagaagatttccaaaaagaagaaaaagaagattttacagaagaacaaaatatagaagacctgctcgccgccgtcgcagacgcagaaggaaggtaagaagaaaaaaaaaaactcttatagtaagacaatggcagccagactctattgtactctgtaaaattaaagggtatgactctataatatggggagctgaaggcacacagtttcaatgttctacacatgaaatgtatgaatatacaagacaaaagtaccctgggggaggaggatttggtgtacaactttacagcttagagtatttgtatgaccaatggaaacttagaaataatatatggactaaaacaaatcaactcaaagatttgtgtagatacttaaaatgtgttatgaccttttacagacaccaacacatagattttgtaattgtatatgaaagacaacccccatttgaaatagataaactaacatacatgaaatatcatccatatatgttattacaaagaaagcataaaataattttacctagtcaaacaactaatcctagaggtaaattaaaaaaaaagaaaactattaaacctcccaaacaaatgctcagcaaatggttttttcaacaacaatttgctaaatatgatctactacttattgctgcagcagcatgtagtttaagataccctagaataggctgctgcaatgaaaatagaatgataaccttatactgtttaaatactaaattttatcaagatacagaatggggaactacaaaacaggccccccactactttaaaccatatgcaacaattaataaatccatgatatttgtctctaactatggaggtaaaaaaacagaatataacataggccaatggatagaaacagatatacctggagaaggtaatctagcaagatactacagatcaataagtaaagaaggaggttacttttcacctaaaatactgcaagcatatcaaacaaaagtaaagtctgtagactacaaacctttaccaattgttttaggtagatataacccagcaatagatgatggaaaaggcaacaaaatttacttacaaactataatgaatggccattggggcctacctcaaaaaacaccagattatataatagaagaggtccctctttggctaggcttctggggatactataactacttaaaacaaacaagaactgaagctatatttccactacacatgtttgtagtgcaaagcaaatacattcaaacacaacaaacagaaacacctaacaatttttgggcatttatagacaacagctttatacagggcaaaaacccatgggactcagttattacttactcagaacaaaagctatggtttcctacagttgcatggcaactaaaaaccataaatgctatttgtgaaagtggaccatatgtacctaaactagacaatcaaacatatagtacctgggaactagcaactcattactcatttcactttaaatggggtggtccacagatatcagaccaaccagttgaagacccaggaaacaaaaacaaatatgatgtgcccgatacaatcaaagaagcattacaaattgttaacccagcaaaaaacattgctgccacgatgttccatgactgggactacagacggggttgcattacatcaacagctattaaaagaatgcaacaaaacctcccaactgattcatctctcgaatctgattcagactcagaaccagcacccaagaaaaaaagactactaccagtcctccacgacccacaaaagaaaacggaaaagatcaaccaatgtctcctctctctctgcgaagaaagtacatgccaggagcaggaaacggaggaaaacatcctcaagctcatccagcagcagcagcagcagcagcagaaactcaagcacaacctcttagtactaatcaaggacttaaaagtgaaacaaagattattacaactacaaacgggggtactagaataacccttaccagatttaaaccaggatttgagcaagaaactgaaaaagagttagcacaagcatttaacagaccccctagactgttcaaagaagataaacccttttacccctggctacccagatttacaccccttgtaaactttcaccttaattttaaaggctaggcctacactgctcacttagtggtgtatgtttattaaagtttgcaccccagaaaaattgtaaaataaaaaaaaaaaaaaaaaataaaaaattgcaaaaattcggcgctcgcgcgcgctgcgcgcgcgagcgccgtcacgcgccggcgctcgcgcgccgcgcgtatgtgctaacacaccacgcacctagattggggtgcgcgcgtagcgcgcgcaccccaatgcgccccgccctcgttccgacccgcttgcgcgggtcggaccacttcgggctcgggggggcgcgcctgcggcgcttatttactaaacagactccgagtcgccattgggccccccctaagctccgcccccctcatgaatattcataaaggaaaccacaaaattagaattgccgaccacaaactgccatatgctaattagttccccttttacacagtaaaaaggggaagtgggggggcagagcccccccacaccccccgcggggggggcagagccccccccgcaccccccctacgtcacaggccacgcccccgccgccatcttgggtgcggcagggcggggactaaaatggcgggacccaatcattttatactttcactttccaattaaaacccgccacgtcacacaaaag

SEQ ID NO: 49 - protein, 101 aa, Torque teno midi virus 1
MWMSGIADSHDSWCDCDTPFAHLLASIFPPGHTDRTRTIQEILTRDFRKTCLSGGADATNSGMAETIEEKREDFQKEEKEDFTEEQNIEDLLAAVADAEGR

SEQ ID NO: 50 - protein, 237 aa, Torque teno midi virus 1
MWMSGIADSHDSWCDCDTPFAHLLASIFPPGHTDRTRTIQEILTRDFRKTCLSGGADATNSGMAETIEEKREDFQKEEKEDFTEEQNIEDLLAAVADAEGRYQTNQLKTQETKTNMMCPIQSKKHYKLLTQQKTLLPRCSMTGTTDGVALHQQLLKECNKTSQLIHLSNLIQTQNQHPRKKDYYQSSTTHKRKRKRSTNVSSLSAKKVHARSRKRRKTSSSSSSSSSSSSRNSSTTS

SEQ ID NO: 51 - protein, 239 aa, Torque teno midi virus 1
MWMSGIADSHDSWCDCDTPFAHLLASIFPPGHTDRTRTIQEILTRDFRKTCLSGGADATNSGMAETIEEKREDFQKEEKEDFTEEQNIEDLLAAVADAEGRTSTQEKKTTTSPPRPTKENGKDQPMSPLSLRRKYMPGAGNGGKHPQAHPAAAAAAAETQAQPLSTNQGLKSETKIITTTNGGTRITLTRFKPGFEQETEKELAQAFNRPPRLFKEDKPFYPWLPRFTPLVNFHLNFKG

SEQ ID NO: 52 - protein, 673 aa, Torque teno midi virus 1
MPFWWGRRNKFWYGRNYRRKKRRFPKRRKRRFYRRTKYRRPARRRRRRRRKVRRKKKTLIVRQWQPDSIVLCKIKGYDSIIWGAEGTQFQCSTHEMYEYTRQKYPGGGGFGVQLYSLEYLYDQWKLRNNIWTKTNQLKDLCRYLKCVMTFYRHQHIDFVIVYERQPPFEIDKLTYMKYHPYMLLQRKHKIILPSQTTNPRGKLKKKKTIKPPKQMLSKWFFQQQFAKYDLLLIAAAACSLRYPRIGCCNENRMITLYCLNTKFYQDTEWGTTKQAPHYFKPYATINKSMIFVSNYGGKKTEYNIGQWIETDIPGEGNLARYYRSISKEGGYFSPKILQAYQTKVKSVDYKPLPIVLGRYNPAIDDGKGNKIYLQTIMNGHWGLPQKTPDYIIEEVPLWLGFWGYYNYLKQTRTEAIFPLHMFVVQSKYIQTQQTETPNNFWAFIDNSFIQGKNPWDSVITYSEQKLWFPTVAWQLKTINAICESGPYVPKLDNQTYSTWELATHYSFHFKWGGPQISDQPVEDPGNKNKYDVPDTIKEALQIVNPAKNIAATMFHDWDYRRGCITSTAIKRMQQNLPTDSSLESDSDSEPAPKKKRLLPVLHDPQKKTEKINQCLLSLCEESTCQEQETEENILKLIQQQQQQQQKLKHNLLVLIKDLKVKQRLLQLQTGVLE

SEQ ID NO: 53 - protein, 209 aa, Torque teno midi virus 1
MPFWWGRRNKFWYGRNYRRKKRRFPKRRKRRFYRRTKYRRPARRRRRRRRKISDQPVEDPGNKNKYDVPDTIKEALQIVNPAKNIAATMFHDWDYRRGCITSTAIKRMQQNLPTDSSLESDSDSEPAPKKKRLLPVLHDPQKKTEKINQCLLSLCEESTCQEQETEENILKLIQQQQQQQQKLKHNLLVLIKDLKVKQRLLQLQTGVLE

SEQ ID NO: 54 - protein, 209 aa, Torque teno midi virus 1; identical to SEQ ID NO: 53

SEQ ID NO: 55 - protein, 25 aa, Artificial Sequence
  source: /note="Description of Artificial Sequence: Synthetic peptide"
  VARIANT (3)..(3): /replace="Ile"
  MOD_RES (9)..(10): Any amino acid
  MOD_RES (15)..(15): Any amino acid
  MOD_RES (17)..(17): Any amino acid
  MOD_RES (20)..(20): Any amino acid
  MOD_RES (24)..(24): Any amino acid
  MISC_FEATURE (1)..(25): /note="Variant residues given in the sequence have no preference with respect to those in the annotations for variant positions"
LILRQWQPXXIRRCXIXGYXPLIXC

SEQ ID NO: 56 - protein, 7 aa, Artificial Sequence
  source: /note="Description of Artificial Sequence: Synthetic peptide"
  MOD_RES (3)..(4): Any amino acid
  MOD_RES (6)..(6): Any amino acid
NYXXHXD

SEQ ID NO: 57 - protein, 9 aa, Artificial Sequence
  source: /note="Description of Artificial Sequence: Synthetic peptide"
  MOD_RES (4)..(5): Any amino acid
FSLXXLYDZ

SEQ ID NO: 58 - protein, 18 aa, Artificial Sequence
  source: /note="Description of Artificial Sequence: Synthetic peptide"
  MOD_RES (2)..(2): Any amino acid
  MOD_RES (5)..(5): Any amino acid
  MOD_RES (8)..(8): Any amino acid
  MOD_RES (16)..(16): Any amino acid
NXWTXSNXDLDLCRYXGC

SEQ ID NO: 59 - protein, 16 aa, Artificial Sequence
  source: /note="Description of Artificial Sequence: Synthetic peptide"
  MOD_RES (2)..(2): Any amino acid
  MOD_RES (5)..(5): Any amino acid
  MOD_RES (9)..(9): Any amino acid
  MOD_RES (11)..(11): Any amino acid
  MOD_RES (13)..(13): Any amino acid
TXPSXHPGXMXLXKHK

SEQ ID NO: 60 - protein, 10 aa, Artificial Sequence
  source: /note="Description of Artificial Sequence: Synthetic peptide"
  MOD_RES (5)..(5): Any amino acid
  MOD_RES (9)..(9): Any amino acid
IPSLXTRPXG

SEQ ID NO: 61 - protein, 18 aa, Artificial Sequence
  source: /note="Description of Artificial Sequence: Synthetic peptide"
  MOD_RES (3)..(3): Any amino acid
  MOD_RES (6)..(6): Any amino acid
  MOD_RES (9)..(9): Any amino acid
  MOD_RES (16)..(16): Any amino acid
RIXPPXLFXDKWYFQXDL

SEQ ID NO: 62 - protein, 8 aa, Artificial Sequence
  source: /note="Description of Artificial Sequence: Synthetic peptide"
  MOD_RES (3)..(3): Any amino acid
  MOD_RES (5)..(5): Any amino acid
LLXIXATA

SEQ ID NO: 63 - protein, 11 aa, Artificial Sequence
  source: /note="Description of Artificial Sequence: Synthetic peptide"
  MOD_RES (2)..(3): Any amino acid
  MOD_RES (6)..(6): Any amino acid
  MOD_RES (9)..(9): Any amino acid
LXXPFXSPXTD

SEQ ID NO: 64 - protein, 14 aa, Artificial Sequence
  source: /note="Description of Artificial Sequence: Synthetic peptide"
  MOD_RES (4)..(5): Any amino acid
  MOD_RES (9)..(9): Any amino acid
  MOD_RES (12)..(12): Any amino acid
YNPXXDKGXGNXIW

SEQ ID NO: 65 - protein, 8 aa, Artificial Sequence
  source: /note="Description of Artificial Sequence: Synthetic peptide"
  MOD_RES (7)..(7): Any amino acid
CPYTZPXL

SEQ ID NO: 66 - protein, 8 aa, Artificial Sequence
  source: /note="Description of Artificial Sequence: Synthetic peptide"
  MOD_RES (1)..(1): Any amino acid
  MOD_RES (4)..(4): Any amino acid
  MOD_RES (6)..(6): Any amino acid
XFGXGXMP

SEQ ID NO: 67 - protein, 8 aa, Artificial Sequence
  source: /note="Description of Artificial Sequence: Synthetic peptide"
  MOD_RES (3)..(3): Any amino acid
  MOD_RES (6)..(6): Any amino acid
  MOD_RES (8)..(8): Any amino acid
HQXEVXEX

SEQ ID NO: 68 - protein, 12 aa, Artificial Sequence
  source: /note="Description of Artificial Sequence: Synthetic peptide"
  MOD_RES (3)..(3): Any amino acid
  MOD_RES (5)..(5): Any amino acid
  MOD_RES (7)..(7): Any amino acid
KYXFXFXWGGNP

SEQ ID NO: 69 - protein, 8 aa, Artificial Sequence
  source: /note="Description of Artificial Sequence: Synthetic peptide"
  MOD_RES (5)..(5): Any amino acid
HSWDXRRG

SEQ ID NO: 70 - protein, 7 aa, Artificial Sequence
  source: /note="Description of Artificial Sequence: Synthetic peptide"
  MOD_RES (5)..(5): Any amino acid
AIKRXQQ

SEQ ID NO: 71 - protein, 8 aa, Artificial Sequence
  source: /note="Description of Artificial Sequence: Synthetic peptide"
  MOD_RES (1)..(1): Any amino acid
  MOD_RES (5)..(6): Any amino acid
XQZQXXLR

SEQ ID NO: 72 - protein, 9 aa, Artificial Sequence
  source: /note="Description of Artificial Sequence: Synthetic peptide"
  MOD_RES (3)..(3): Any amino acid
  VARIANT (4)..(4): /replace="Ile"
  MOD_RES (6)..(7): Any amino acid
  MISC_FEATURE (1)..(9): /note="Variant residues given in the sequence have no preference with respect to those in the annotations for variant positions"
PRXLQXXDP

SEQ ID NO: 73 - protein, 8 aa, Artificial Sequence
  source: /note="Description of Artificial Sequence: Synthetic peptide"
  MOD_RES (5)..(5): Any amino acid
HSWDXRRG

SEQ ID NO: 74 - protein, 7 aa, Artificial Sequence
  source: /note="Description of Artificial Sequence: Synthetic peptide"
  MOD_RES (5)..(5): Any amino acid
AIKRXQQ

SEQ ID NO: 75 - protein, 7 aa, Artificial Sequence
  source: /note="Description of Artificial Sequence: Synthetic peptide"
  MOD_RES (4)..(5): Any amino acid
QZQXXLR

SEQ ID NO: 76 - protein, 7 aa, Artificial Sequence
  source: /note="Description of Artificial Sequence: Synthetic peptide"
  MOD_RES (2)..(2): Any amino acid
KXKRRRR

SEQ ID NO: 77 - protein, 13 aa, Artificial Sequence
  source: /note="Description of Artificial Sequence: Synthetic peptide"
  MOD_RES (3)..(3): Any amino acid
  MOD_RES (6)..(7): Any amino acid
  MOD_RES (10)..(11): Any amino acid
PIXSLXXYKXXTR

SEQ ID NO: 78 - protein, 12 aa, Artificial Sequence
  source: /note="Description of Artificial Sequence: Synthetic peptide"
  MOD_RES (3)..(3): Any amino acid
  MOD_RES (10)..(10): Any amino acid
LAXQLLKECXKN

SEQ ID NO: 79 - protein, 6 aa, Artificial Sequence
  source: /note="Description of Artificial Sequence: Synthetic peptide"
  MOD_RES (4)..(4): Any amino acid
HLNXLA

SEQ ID NO: 80 - protein, 5 aa, Artificial Sequence
  source: /note="Description of Artificial Sequence: Synthetic peptide"
DRPPR

SEQ ID NO: 81 - protein, 9 aa, Artificial Sequence
  source: /note="Description of Artificial Sequence: Synthetic peptide"
  MOD_RES (2)..(2): Any amino acid
  MOD_RES (8)..(8): Any amino acid
DXPFYPWXP

SEQ ID NO: 82 - protein, 7 aa, Artificial Sequence
  source: /note="Description of Artificial Sequence: Synthetic peptide"
  MOD_RES (2)..(2): Any amino acid
  MOD_RES (6)..(6): Any amino acid
VXFKLXF

SEQ ID NO: 83 - protein, 15 aa, Artificial Sequence
  source: /note="Description of Artificial Sequence: Synthetic peptide"
  MOD_RES (2)..(2): Any amino acid
  MOD_RES (9)..(9): Any amino acid
  MOD_RES (14)..(14): Any amino acid
WXPPVHBVXGIERXW

SEQ ID NO: 84 - protein, 6 aa, Artificial Sequence
  source: /note="Description of Artificial Sequence: Synthetic peptide"
  MOD_RES (6)..(6): Any amino acid
AKRKLX

SEQ ID NO: 85 - protein, 10 aa, Artificial Sequence
  source: /note="Description of Artificial Sequence: Synthetic peptide"
  MOD_RES (4)..(4): Any amino acid
  MOD_RES (7)..(8): Any amino acid
PSSXDWXXEY

SEQ ID NO: 86 - protein, 5 aa, Artificial Sequence
  source: /note="Description of Artificial Sequence: Synthetic peptide"
DRPPR

SEQ ID NO: 87 - protein, 5 aa, Artificial Sequence
  source: /note="Description of Artificial Sequence: Synthetic peptide"
PFYPW

SEQ ID NO: 88 - protein, 8 aa, Artificial Sequence
  source: /note="Description of Artificial Sequence: Synthetic peptide"
  MOD_RES (3)..(3): Any amino acid
  MOD_RES (7)..(7): Any amino acid
NVXFKLXF

SEQ ID NO: 89 - protein, 25 aa, Artificial Sequence
  source: /note="Description of Artificial Sequence: Synthetic peptide"
  VARIANT (1)..(1): /replace="Ile"
  MOD_RES (2)..(5): Any amino acid
  MOD_RES (9)..(13): Any amino acid
  MOD_RES (15)..(15): Any amino acid
  MOD_RES (17)..(17): Any amino acid
  MOD_RES (19)..(21): Any amino acid
  VARIANT (22)..(22): /replace="Ile"
  MISC_FEATURE (1)..(25): /note="Variant residues given in the sequence have no preference with respect to those in the annotations for variant positions"
LXXXXWQPXXXXXCXIXGXXXLWQP

SEQ ID NO: 90 - protein, 15 aa, Artificial Sequence
  source: /note="Description of Artificial Sequence: Synthetic peptide"
  MOD_RES (2)..(2): Any amino acid
  MOD_RES (4)..(6): Any amino acid
  MOD_RES (8)..(11): Any amino acid
  MOD_RES (13)..(13): Any amino acid
NXWXXXNXXXXLXRY

SEQ ID NO: 91 - protein, 8 aa, Artificial Sequence
  source: /note="Description of Artificial Sequence: Synthetic peptide"
  MOD_RES (4)..(5): Any amino acid
  MOD_RES (7)..(7): Any amino acid
YNPXXDXG

SEQ ID NO: 92 - DNA, 456 bp, Torque teno virus
atgcacttttctaggatatccaggaagaaaaggctactgctactgcacacagtgccaactccacagaaaactctcaaacttttaagaggtatgtggagtcctcccactgacgatgaacgtgtccgcgagcgaaaatggtttctcgcaactgtctattctcactctgctttctgtggctgcaatgatcctgtcggtcacctctgtcgcctggctactctctctaaccgtccggagaacccgggaccctccgggggacgtcgtgctccttcgatcggggtcctacccgctctcccggctgctaccgagcagccaggtgatcgagcaccatggcctatgggtggtggaggagacgccgcagaaggtggaagagatggaggagaaggcccaggtggagacgcccatggaggacccgcagacgcagacctgctagacgccgtggacgccgcggaacagtaa

SEQ ID NO: 93 - DNA, 2298 bp, Torque teno virus
atggcctatgggtggtggaggagacgccgcagaaggtggaagagatggaggagaaggcccaggtggagacgcccatggaggacccgcagacgcagacctgctagacgccgtggacgccgcggaacagtaaggagacggaggcgcgggaggtggaggaggcgctataggaggtggaggagaaagggcagacgcaggagaaaaaagaaacttataataagacaatggcagccaaactataccagaaagtgcaacatagtaggctacatgccagtaatcatgtgtggagaaaacactctaataagaaactatgccacacacgcagacgactgctactggccgggaccctttgggggcggcatggccacccagaaattcacacccagaatcctgtacgatgactacaagaggtttatgaactactggacctcctcaaacgaggacctagacctctgtagatacaggggagtcaccctgtactttttcagacacccagatgtagactttatcatcttaataaacaccacacctccattcgtagatacagagatcacaggacccagcatacatccgggcatgatggccctgaacaagagagccaggttcatccccagcctaaagactagacctggcagaagacacatagtaaagattagagtgggggcccccaaactgtacgaggacaagtggtacccccagtcagaactctgtgacgtgcccctgctaaccgtctacgcgaccgcagcggatatgcaatatccgttcggctcaccactaactgacactcctgttgtaaccttccaagtgttgcgcagcatgtacaacgacgccctcagcacacttccctctaactttgaaaacgcaagcagtccaggccaaaaactttacaaagaaatatctacatatttaccatactacaacaccacagaaacaatagcacaactaaagagatatgtagaaaatacagaaaaaaatggcacaacgccaaacccgtggcaatcaaaatatgtaaacactactgccttcaccactgcactaaatgttacaactgaaaaaccatacaccaccttctcagacagctggtacaggggcacagtatacaaagaaacaatcactgaagtgccacttgccgcagcaaaactctatcaaaaccaaacaaaaaagctgctgtctacaacatttacaggagggtccgagtacctagaataccatggaggcctgtacagctccatatggctatcagcaggccgatcctactttgaaacaaagggagcatacacagacatctgctacaacccctacacagacagaggagagggcaacatggtgtggatagactggctatcaaaaacagactccagatatgacaaaacccgcagcaaatgccttatagaaaagctacccctatgggcagcagtatacgggtacccagaatactgtgccaagagcaccggagactcaaacatagacatgaacgccagagtagtaataaggtgcccctacaccgtcccccagatgatagacaccagcgacgaactaaggggcttcatagtatacagctttaactttggcaggggcaaaatgcccggaggcagcagcgaggtacccataagaatgagagccaagtggtacccctgcctgtttcaccaaaaagaagttctagaagccttgggacagtcgggccccttcgcctaccactgcgaccaaaaaaaagcagtgctaggtctaaaatacagatttcactggatatggggcggaagccccgtgtttccacaggttgttagaaacccctgcaaagacacacacggttcctcgggccctagaaagcctcgctcaatacaaatcattgacccgaagtacaacacaccagagctcacaatccacgcgtgggatttcagacgtggcttctttggctcaaaagctattaaaagaatgcaacaacaaccaacagatgctgaacttcttccaccaggccgcaagaggagcaggcgagacacagaagccctccaaagcagccaagaaaagcaaaaagaaagcttacttttcaaacacctccagctccagcgacgaatacccccatgggaaagctcgcaggcctcgcagacagaggcagagagcgaaaaagagcaagagggcagtctctcccagcagctccgagagcagctttaccagcaaaagctcctcggcaagcagctcagggaaatgttcctacaactccacaaaatccaacaaaatcaacacgtcaaccctaccttattgccaagggatcaggctttaatctgctggtctcagattcagtaa

SEQ ID NO: 94 - DNA, 174 bp, Torque teno virus
atgtttggagaccctaaaccatacaaaccctccagcaacgactggaaagaggagtacgaggccgctaagtattgggacaggccccccagatctaaccttagagataaccccttctatccctgggcccccccaagcaatccctacaaagtaaactttaaactaggcttccaataa

SEQ ID NO: 95 - DNA, 456 bp, Torque teno virus
atgcacttttctaggatatccagaaagaaaaggctactgctactgcaaacagagccagctccacagaagactctcaaacttttaaaaggtatgtggagtcctcccactgacgatgaacgtgtccgcgagcgaaaatggttcctcgccactgtttattctcactctgctttctgtggctgcaatgatcctgtcggccacctctgtcgcttggctactctatctaaccgtccggagaacccgggaccctccgggggacgtcgtgctccttcgatcgggatcctacccgctctcccggctgctaccgagcagcccggtgatcgagcaccatggcctatgggtggtggaggagacgccgcagaaggtggaagagatggaggagaaggcccaggtggagacgcccatggaggacccgcagacgcagacctgctagacgccgtggacgccgcagaacagtaa

SEQ ID NO: 96 - DNA, 2298 bp, Torque teno virus
atggcctatgggtggtggaggagacgccgcagaaggtggaagagatggaggagaaggcccaggtggagacgcccatggaggacccgcagacgcagacctgctagacgccgtggacgccgcagaacagtaaggagacggaggcgcgggaggtggaggaggcgctataggaggtggaggagaaagggcagacgcgggagaaaaaagaaacttataataaaacaatggcagccaaactataccagagagtgcaacatagtaggctacatgccagtaatcatgtgtggagagaacactctaataagaaactatgccacacacgcagacgactgctactggccgggaccctttgggggcggcatggccacccagaaattcacactcagaatcctgtacgatgactacaagaggtttatgaactactggacctcctcaaacgaggacctagacctctgtagatacaggggagtcaccctgtactttttcagaaacccagatgtagactttatcatcctcataaacaccacacctccgttcgtagatacagagatcacaggacccagcatacatccgggcatgatggccctcaacaaaagagccaggttcatccccagcctaaaaactagacctggcagaagacacatagtaaagattaaagtgggggcccccaaactgtacgaggacaagtggtacccccagtcagaactctgtgacatgcccctactaaccgtctacgccaccgcagcggatatgcaatatccgttcggctcaccactaactgacactcctgttgtaaccttccaagtgttgcgcagcatgtacaacgacgcccttagcatacttccctctaactttcaaagcccagacagtccaggccaaaaactttacgaacaaatatctaagtatttaccatactacaacaccacagaaacaatggcacaactaaagagatatatagaaaatacagaaaaaaataccacatcgccaaacccatggcaaacaaaatatgtaaacactactgccttcaccactccacaaactgttacaactcaacagccatacaccagcttctcagacagctggtacaggggcacagtatacacaaacgaaatcactaaggtgccacttgccgcagcaaaagtgtatgaaactcaaacaaaaaacctgctgtctacaacatttacaggagggtcagagtacctagaataccatggaggcctgtacagctccatatggctatcagcaggccgatcctactttgaaacaaagggagcatacacagacatctgctacaacccctacacagacagaggagagggcaacatggtgtggatagactggctatcaaaaacagactccagatatgacaaaacccgcagcaaatgccttatagaaaagctacccctatgggcagcagtatacgggtacgcagaatactgtgccaagagcaccggagactcaaacatagacatgaacgccagagtagtaattaggtgcccctacaccaccccccagatgatagacaccagcgacgaactaaggggcttcatagtatacagctttaactttggcaggggcaaaatgcccggaggcagcagcgaggtacccattagaatgagagccaagtggtacccctgcctacttcaccaaaaaggagttctagaagccttaggacagtcaggccccttcgcctaccaccgcgaccaaaaaaaagcagtgctaggtctaaaatacagatttcactggatatggggcggaaaccccgtgtttccacaggttgttagaaacccctgcaaagacacacacggttcctcgggccctagaaagcctcgctcaatacaaatcattgacccgaagtacaacacaccagagctcacaatccacgcgtgggatttcagacgtggcttctttggcccaaaagctattaagagaatgcaacaacaaccaacagatgctgaacttcttccaccaggccgcaagaggagcaggcgagacaccgaagccctccaaagcagccaagaaaagcagaaagaaagcttacttttcaaacagctccagctccggcgacgagtacccccgtgggaaagctcgcaggcctcgcagacagaggcagagagcgaaaaagagcaagaggacagtctctcccagcagctccgagagcagcttcaccagcaaaagctcctcggcaagcagctcagggaaatgttcctacaactccacaaaatccaacaaaatcaacacgtcaaccctaccctattgccaaaagatcaggctttaatatgctggtctcagattcagtaa

SEQ ID NO: 97 - DNA, 174 bp, Torque teno virus
atgttcggagaccctaaaccatacaaaccctccagcaacgactggaaagaggagtacgaggccgctaaatattgggacaggccccccagatttgaccttagagataagcccttctatccctgggcccccccaagcaatccctacaaagtaaactttaaactaggctttcaataa

SEQ ID NO: 98 - DNA, 150 bp, Torque teno virus
atggctgagttttccacgcccgtccgcagcggtgaagccacggagggacctcagcgcgtcccgagggcgggtgccgaaggtgagtttacacaccgcagtcaaggggcaattcgggctcgggactggccgggctatgggcaaggctcttaa

SEQ ID NO: 99 - DNA, 450 bp, Torque teno virus
atgtttctcggtaaactttacagaaagaaaaggaaagtgcttctgcagactgtgccagacccacagaaggctaggcggcttctgattatgtggcagccccccgtgcacaaagtacccgggatcgagagaaactggtacgagagttgctttcgatcccatgctgctgtgtgtggctgtggcgactttgttggccatcttaatcatctggcagctactctgggtcgccctccgcgttctcggcaccccgggggccccggcactccgcagataagaaacctgccagcgctcccggcaccccagggtgagcccggtgacagagcgccatggcctacggatggtggggccgccggcgccgctggagaagatggaggacgcggcgcagaccgtggagaaccaggagacgtagaagacgacgcgctcctcgccgctttcgacctcgtcgaagagtaa

SEQ ID NO: 100 - DNA, 2202 bp, Torque teno virus
atggcctacggatggtggggccgccggcgccgctggagaagatggaggacgcggcgcagaccgtggagaaccaggagacgtagaagacgacgcgctcctcgccgctttcgacctcgtcgaagagtaaggaggcgcagggggcggtggcgcagacggtatagaaaatggaggagacgcaggggcagacggacgcacagaaaaaagataatcataaaacagtggcagccgaactttataagacgctgctacataataggctacctgcctctcatattctgtggcgagaacaccaccgccaataactttgccacccactcggacgacatgatagccaaaggaccgtggggggggggcatgactaccactaagttcactttgagaatcctgtacgacgagtttaccaggtttatgaacttctggactgtcagtaacgaagacctagacctgtgtagatacgtgagctgcaaactgatattctttaagcaccccacggtagactttatagtcaggataaacacagagcctccgttcctagacactaacctgaccgcggcacagattcacccgggcatcatgatgctaagcaaaaaacacatactcataccctctctaaagaccaggcctagcagaaaacacagggtggtcgtcagggtgggcccacctagactgtttcaagacaagtggtacccccagtcagacctgtgtgacacagttctgctttccgtgtttgcaacggcctgtgacttgcaatatccgttcggctcaccactaactgacaacccttgcgtcaacttccagattctggggcaccagtacaaaaaccaccttagtattagctccacaaacgataccactaacaaacaacactatgacaacactttatttaacaaaatagtattatataacacttttcaaacaatagctcagctcaaagaaacaggacaactcacaaacttatggaacgaagtacaaaacacaacagcactgtcaccaaaaggcacaaatgcaactataagcaaagacacctggtacaaaggaaacacatacaaagacaagattaaagagttagcagaaaaaactcgaagtagatttgcagctgcaacaaaagcagccctgccaaactaccctacaatcatgtccacagacctgtatgagtaccactcaggcatatactccagcatattcctagcagcaggcaggagctactttgagaccccgggggcctacacagacgtcatatacaacccttttacagacaaaggcacaggaaacatggtctggatagactacctcacaaaaccagactccatatacacaaagaacaaaagcaaatgcgagatatttgacgtacccctgtgggccaccttcacaggatactcagaattctgttcaaaagttacaggagacaccgccattcacctaactgccagagtagtagtcagatgcccctacaccgagcccatgctaatagaccactcagaccccaacaggggctttgtaccatactcctttaactttggagagggcaagatgcccggaggctcctcaaaagtacccataagaatgagagccaagtggtacgtgaacatgtttcaccagcaagaattcatggaggccatagttgagagcggaccgcttgcttacaagggcgacataaaatcagcggtactcaccatgaaatacagattccactggaaatggggcggaaaccctatatccaaacaggtcgtccggaatccctgctccacctccagcacctccgcgggccatcgaggacctcgcagcatacaagtcgttgacccgaagcacgttaccccggaagtcacctggcactcgtgggacatcaagcgaggtctctttggcaaagcaggtattaagagaatgcaacaagaatcagatgctctttacattcctacaggaccactcaagaggccacggagggacaccaacgcccaagacccagaagagcaaaacgaaagctcaggtttcagagtccagcagcgactcccctgggtccactccagccaagaaacgcaaagctcccaagaggagatgcaagcggaggggacggtacaagaacaactcctcctccagctccgagagcagcgagtactccggttccagctccaacagctcgccagccaagtcctcaaagtgcaagcagggcaaggcctacaccccctattatcttcccaagcgtaa

SEQ ID NO: 101 - DNA, 180 bp, Torque teno virus
atgtttgagccccagggtcccaaacccatacagggctacaacgattggttagaagagtacacctgctgtaaattctgggacaggcctcccagaaagctacacacagatacacccttttacccctgggcaccaaaacccccagaccaagtgagagtctcctttaaacttaacttccaataa

SEQ ID NO: 102 - DNA, 444 bp, TTV-like virus DXL1
atgtttcttggcagggcctggagaaagaaaaggcaagtgccactgccgacactgccagtggtgccgcttccacaaccttcacctatgagcagccagtggagacccccggttcacaatgtccaggggctggagcgcaattggtgggagtgcttcttccgttctcatgcttgtttttgtggctgtggtgatgctattactcatattaatcatctggcgactcgttttggacgtcctcctactacctcaactccccgaggaccgcaggcacctccagtgactccgtacccggccctgccggccccagagcctagccctgagccatggcgtggcgccggtggcgatggcggccgtggtggagacgccggaggcgccgccggtggagaaggagacggaggagacccagacgacgccgcccttatcgacgccgtcgacctcgcagagtaa

SEQ ID NO: 103 - DNA, 2319 bp, TTV-like virus DXL1
atggcgtggcgccggtggcgatggcggccgtggtggagacgccggaggcgccgccggtggagaaggagacggaggagacccagacgacgccgcccttatcgacgccgtcgacctcgcagagtaaggaggcgcagggggcggtggaggcgcgcgtacagacgttgggggcgacgcagacgcagacgcaggcacaaaaagaaacttgtactgactcagtggcaaccagcagtagttaagaggtgcctaatagtgggctttgacccccttataatatgtggcattaacagaacaatatttaactacactacacactctgaagactttacttttaacaacgacagctttggaggggggctctgtaccgctcagtacacactaagaatccttttccaagaaaagctggcccagcacaacttctggtcagctagcaacgaagacctagaccttgccaggtacctaggagccacaatagtactttacagacaccctacagtagacttcttagttagaattcgcaccagtcctccctttgaggacacagacatgacagccatgacactacatccaggcatgatgatgctagctaaaaagacaattaaaattcccagtcttaaaacaagaccgtccagaaaacacgtagtaaggattagagtaggggcccctaaactatttgaagacaagtggtacccccagaacgagctatgtgatgtaactctgctaaccatacaggcaaccacagctgatttccaatatccgttcggctcaccactaacgaactccccctgttgcaacttccaggttcttaacagtaactatgacaatgcacattccatacttaacttgtcaaacgaaccaacaaacaaatggcacacctatagaaataactgctataaatttctactagaacagtacagctactacaacactaaacaagtagtagcacaacttaaatataaatggaaccctaatcaaaaccctactatgccaaatacaagcaatgcatcactttctaaaaaacctgatgaccttactaaaaccaaaacaacaaacgagtatccacattgggacaccctatatggtggtttagcatatggacacagcactgtaacacctggcactacctcatcaccaacagacctaaaaacacaaatgcttacaggcaacgaattttatacaacagcaggcaaaaagttaatagatacatttcacccaattccttactatgaaaacggatcttctaaagccaacaccaacatatttgactactacacaggcatgtacagtagtattttcctgtcttcaggcagatcaaacccagaagtaaagggcagctacacagacatctcttacaaccctctgacagacaagggagtaggtaacatgatttggatagactggctcactaaaggagacacagtatacgaccccaaaaaaagcaagtgcctactctcagactttccattgtggtcactttgttatggatacccagactactgcagaaaacaaaccggagactcaggtatttactatgactacagagtacttataagatgtccatacacataccctcaattaataaaacacaacgacaaatactttggcttcgtagtgtacagcgaaaactttggactggggcgactaccaggaggcaaccctaaccccccaactagaatgagactgcactggtaccctaatatgttccaccaaacagaagtactagagtgcatagctcaaagcggaccgtttgcttatcatggagacgagagaaaagctgttctgactgccaaatacaagttcagatggaagtggggaggcaatcctgtgtttcaacaggttctccgagacccctgcaccggaggtgccgtggcgccccacaccagtcgacaccctcgtgcaatacaagtccatgacccgaagtatcaggccccggagtacctcttccacaaatgggacttcagaaggggactgtttagcactaaaggtattaagagagtgtcagaacaaccagtacatgatgagtattttacagggagcagcaagagacccaagaaagacaccaacccaagcccccaaggagaagagcaaaaagaaggctcgcgtttcagagtcccagagctcagaccctggctcccctccagccaggaaacgcagagccaaagcgagcaagaagaaacagccccgaaaacggtccaagagcagctacaagaacaactccagcagcagcagctcatgggaatccagctcagaaacgtctgtctccagctcgcaagagtccaagcggggcacagtctccaccccgttttccaatgccatgcataa

SEQ ID NO: 104 - DNA, 435 bp, TTV-like virus DXL1
atgacccgaagtatcaggccccggagtacctcttccacaaatgggacttcagaaggggactgtttagcactaaaggtattaagagagtgtcagaacaaccagtacatgatgagtattttacagggagcagcaagagacccaagaaagacaccaacccaagcccccaaggagaagagcaaaaagaaggctcgcgtttcagagtcccagagctcagaccctggctcccctccagccaggaaacgcagagccaaagcgagcaagaagaaacagccccgaaaacggtccaagagcagctacaagaacaactccagcagcagcagctcatgggaatccagctcagaaacgtctgtctccagctcgcaagagtccaagcggggcacagtctccaccccgttttccaatgccatgcataaacaaagtttttattttccctga

SEQ ID NO: 105 - DNA, 465 bp, TTV-like virus DXL2
atgtttctcggtaaactttacagaaagaaaaggaaactgctactgcaagctgtgcgagctccacaggcgccatcttccatgagctcctcctggcgagtgccccgcggcgatgtctccgcccgcgagctatgttggtaccgctcagttcgagagagccacgatgctttttgtggctgtcgtgatcctgtttttcatctttctcgtctggctgcacgttctaaccatcagggacctccgacgccccccacggacgagcgcccgtcggcgtctaccccagtgaggcgcctgctgccgctgccctcctaccccggcgagggtccccaggctagatggcctggtggagatggagaaggcgctggtgacgcccgcggaggcgctggagatggcggcgcccgcgcaggcgaagaagagtaccggcccgaagacctcgacgagctgttcggcgctaccgaacaagaacagtaa

SEQ ID NO: 106 - DNA, 2070 bp, TTV-like virus DXL2
atgccagttatctgggcgggcatgggcacggggggccaaaactacgccgtccgctcagatgactttgtagtagacaagggcttcgggggctccttcgctacagagactttctccttgagagtactgtatgaccagcaccagaggggctttaaccggtggtcccacaccaacgaggacctagaccttgcccgttacaggggatgcaaatggaccttttacagacacccagacactgactttatagtgtacttcactaacaatccccccatgaaaactaaccagtacactgcccctctcaccactcctggaatgctcatgagaagcaaatataagatactaatacctagttttaaaacaaaacccaagggaaaaaagacaataagcttcagagccagacccccaaaactattccaagacaagtggtacactcaacaagacctctgccctgtgcccctcatccaactgaacttaaccgcagctgatttcacacatccgttcggcttaccactaactgactctccttgcgtaaggttccaagtcctcggagacttgtacaataactgtctcaatatagaccttccgcaatttgatgacaagggtacaatttcagacgcatcctcttacagtagagataataagcagcagttagaagaattatataaaactctatttgttaaaaagggctgcggacactactggcaaacattcatgaccaatagcatggtaaaagcacacatagatgctgcacaggcacaaaaccatcaacaagacacctcaggccctcaaagtgcaaaagatccatttccaacaaaacctgacagaaaccaatttgaacaatggaaaaacaaattcacagaccccagagacagcaactttctctttgccacttatcacccagaaaacattacacagactatcaaaacaatgagagacaataactttgctctagaaactggaaagaatgacctttatggtgattatcaggcccagtatactagaaacactcaccttctagactactacctgggcttctacagccccatattcttgtccagtggcagatccaatactgaattctttactgcctacagagacataatatacaatccactactagacaaaggcacaggtaatatgatttggttccaataccacacaaagactgacaacatatttaaaaaaccagagtgccactgggaaatactagacatgcccctgtgggccctctgcaacggctacaaagagtacctagagagccaaataaaatatggtgatatcttagtagaaggcaaagtcctcataagatgcccatacaccaaacctcccctagcagaccccaacaacagtctagcaggatatgtagtctacaacacaaactttggacaaggcaagtggatcgacggcaagggctacatacccctaagacacaggagcaagtggtatgtcatgctcatgtaccagacggacgtactccatgacctagtgacttgtggaccctggcaatacagagacgataataagaactctcaactgatagccaagtatagatttactttctactggggaggtaacatggtacattctcaggtcatcaggaacccgtgcaaagacacccaagtatccggcccccgtcgacagcctagagagatacaagtcgttgacccgcaactcatcaccccgccgtgggtcctccactcgttcgaccagagacgaggaatgtttactgagacagctatcagacgtctgctcagacaaccactacctggcgagtatgctcctccagcactcagggtcccgctcctctttccctcctcagagttccaacgagagggagaaggtgcagaaagcgacttatcttccccggccaaaagaccacgactctggcaagaagaggacagcgagacgcagacgcagtcctcggaggggccggcggagacgacgagggagctcctcgagcgaaagctcagagagcagcgagtcctcaacctccaactccagcaattcgccgtacaactcgccaagacccaagcgaacctccacataaaccccttattatactcccagcagtaa

SEQ ID NO: 107 - DNA, 273 bp, TTV-like virus DXL2
atgctcctccagcactcagggtcccgctcctctttccctcctcagagttccaacgagagggagaaggtgcagaaagcgacttatcttccccggccaaaagaccacgactctggcaagaagaggacagcgagacgcagacgcagtcctcggaggggccggcggagacgacgagggagctcctcgagcgaaagctcagagagcagcgagtcctcaacctccaactccagcaattcgccgtacaactcgccaagacccaagcgaacctccacataa

SEQ ID NO: 108 - DNA, 465 bp, Torque teno virus
atgtacttttccagaaaaagaagacccaagaaggagaggccgctgccactgcgatacgtgtgtggcctaccgcctagcaggcctgatccgatgagctggcgtccacctgcccacgatgtcccaggacaagagggcctgtggtaccgatcagtttttacttctcatggcgctttttgtggttgcggtgattttgtgggtcatcttcagagacttagcgaacgcctgggtagaccccaaccaccaagaccaccgggcgagccgccgggccctgctgtgagagttctgcctgccctgccgcctccagtacctgaaccaagaagacacgtccagagagagaacccgggatgtggtggtggagacgccgcagatggagggccccatggagaaggaggcgatggagacgacgcagacctcggaccagaagatttagacgagctgctcgacgtcctagacgccccagagtaa

SEQ ID NO: 109 - DNA, 2163 bp, Torque teno virus
atgtggtggtggagacgccgcagatggagggccccatggagaaggaggcgatggagacgacgcagacctcggaccagaagatttagacgagctgctcgacgtcctagacgccccagagtaaggagacctcggcgccgcagggggtgggctcgtagatatagacttagaaggaggcgaaggaggagaagaaggagaaagcttatactaacacaatggcagccagcaaaaataagaaaatgtctagtaataggttatcttgctctagtactatgtgggaacgggacattcagtaaaaactatgcctcccactcagatgactatgtacagaaaggaccctttggagggggactgagcagcatgagatttaacatgagaatactatatgatcaatttaaaagacaccttaacttctggacacacacaaaccaggacctagacctagttagatacagaggctgcaccatgacattttatagacacccagaggtggacttcatagtaaaattcaacagaaaacctccattcctagacacaatagtatcaggtccagccatgcacccaggcatgctaatgacaacaaaacacaaaatactagtaaaaagctttaaaacaaaacccaaaggaaaaggcacagtaaaggtgcgcattcgcccccccacactctttgacgaccgttggtactttcaacatgacatctgcaaaaccacactgttcaccattagcgcaacaccatgtgacctgcggtttccgttctgctcaccacaaactgacaacccttgcgtcaacttcctagttcttgcaggagtgtataacggcaaacttagcatagaacccacaaacgtagaatcacaatataattcactactttcagctatagagacacacacccaaggcactctatttaatacatttaaaacaccagaaatgataaagtgccccccagcagtaaaagccccagaaactggagacatatccacaaactgctacaaaaaactagacatcgcctggggagacactatatggaaccaaagcaccataggcaactttaaaaagaacacagagaacttgtggaatgcaagacacaatcaaacaatgactggtagcaaatacctaaactacagaacaggaatatacagtgccatattcctttcagcaggcagactgtcaccagactttccaggactatacaatgacatagtatacaatcccaccacagacgaaggcataggaaacattgtgtggatagactggtgtacaaaagcagactgcaacttcaatgagacacagtccaaaggagtaataaaagacattccactgtgggcagcactgtttggctatgtagactttctaaaaaagacatttaaagacgaccagctagacaaaactgccagactcactctcataagcccctatacaaagcctcaactaataggacctacacaacccaacaaagggtttgttccgtacgactacaactttggcagagcacacatgccctccggagaatcctacatacctatgtactacagatttagatggtacatctgcctatttcaccaacaaaagtttatagacgacattgtaagcagcgggcccttcgcataccacggctcacagccctcagcaactctcaccactaaatacaaattccactttctctttgggggcaaccccgttccccaacagactgtcagagacccttgtaaccaaccagtctttgacattcccggagccggtggactccctcgtccgatacaagtcgttgacccgaaatacgtcaacgaaggctacacgttccacgcctgggacttccgtagagggctctttggccaagcagctattaaaagagtgtcgggagaacaaacaaatgcttcactttattcatcaggtccaaaacggccaagaacagaaattcctccagaaaatgcagaagaaggctcatattccagggaacaaaaactccagccctggctcgactcgagcgaccaggaagagagcgagacagaagccccagaagaagaagcgacctcgccgccgtcgctacagctccagctcaagcagcagatcagggagcagcgacaactcagatgtggaatccaacacctcttccagcaactagtgaaaacccagcaaaacttgcatatcgacccatgcctacaatag

SEQ ID NO: 110 - DNA, 465 bp, Torque teno virus
atgtacttttccagaaaaagaagacccaagaaggagaggccgctgccactgcgatacgtgtgtggcctaccgcctagcaggcctgatccgatgagctggcgtccacctgcccacgatgtcccaggacaagagggcctgtggtaccgatcagtttttacttctcatggcgctttttgtggttgcggtgattttgtgggtcatcttcagagacttagcgaacgcctgggtagaccccaaccaccaagaccaccgggcggaccgccgggccctgctgtgagagctctgcctgccctgccgcctccggaacctgaaccaagaagacacgtccagagagagaacccgggatgtggtggtggagacgccgcagatggagggccccatggagaaggaggcgatggagacgacgcagacctcggaccagaagatttagacgagctgctcgacgtcctagacgccccagagtaa

SEQ ID NO: 111 - DNA, 2163 bp, Torque teno virus
atgtggtggtggagacgccgcagatggagggccccatggagaaggaggcgatggagacgacgcagacctcggaccagaagatttagacgagctgctcgacgtcctagacgccccagagtaaggagacctcggcgccgcagggggtgggctcgtagatatagacttagaaggaggcggaggaggagaagaaggagaaagcttatactaacacaatggcagtcagcaaaaataagaaaatgtctagtaataggttatcttgctctagtactatgtggaaacgggacattcagtaaaaactatgcctcgcactcagatgactatgtacagaaaggaccctttggagggggactaagcagcatgagatttaacatgagaatactatatgatcaatttaaaagacaccttaacttctggacacacacaaaccaggacctagacctagttagatacagaggctgcaccatgacattttatagacacccagaggtggacttcatagtaaaattcaacagaaaacctccattcctagacacaatagtatcaggtccagccatgcacccaggcatgctaatgacaacaaaacacaaaatactagtaaaaagctttaaaacaaaacccaaaggaaaaggcacagtaaaggtgcgcattcgcccccccacactctttgacgaccgttggtactttcaacatgacatctgcaaaaccacactgttcaccattagcgcaacaccatgtgacctgcggtttccgttctgctcaccacaaactgacaacccttgcgtcaacttcctagttcttgcaggagtgtataacggcaaacttagcatagaagccacaaagttagaatcacaatataattcactagtttcatctatagaaatacccacccaaggcactctatttaatacatttaaaacaccagaaatgataaagtgccccccagcagtaaaagccttagaacattcagacgtaaacagaagctgctacaaaaaactagacagcgcctggggagacactatatggaaccagaacaccatacagaactttaaagaaaacacagacaagttgtgggaagcaagaggcaaccaaacaatgactggtagcaaatacctaaactacagaacaggaatatacagtgccatattcctttcagcaggcagactgtcaccagactttgggggactatacaatgacatagtatacaatcccaccacagacgaaggcataggaaacattgtgtggatagactggtgtacaaaagcagactgcaacttcaatgagacacagtccaaaggagtaataaaagacattccactgtgggcagcactgtttggctatgtagactttctaaaaaagacatttaaagacgaacagctagacaaaattgccagactcactctcataagcccctatacaaagcctcaactaataggacctacacaacccaacaaagggtttgttccgtacgactacaactttggcagagcacacatgccctccggagaatcctacatacctatgtactacagatttagatggtacatctgcctatttcaccaacaaaagtttatagacgacattgtaagcagcgggcccttcgcataccacggctcacagccctcagcaactctcaccactaaatacaaattccactttctctttgggggcaaccccgttccccaacagactgtcagagactcttgtaaccaaccagtctttgacattcccggagccggtggactccctcgtccgatacaagtcgttgacccgaaatacgtcaacgaaggctacacgttccacgcctgggacttccgtagagggctctttggccaagcagctattaaaagagtgtcgggagaacaaacaaatgcttcactttattcatcaggtccaaaacggccaagaacagaaattcctccacaaaatgcagaagaaggctcatattccagggaacaaaaactccagccctggctcgactcgagcgaccaggaagagagcgagacagaagccccagaagaagaagcgacctcgccaccgtcgctacagctccagctcaagcagcagatcagggagcagcgacaactcagatgtggaatccaacacctcttccagcaactagtgaaaacccagcaaaacttgcatatcaatccatgcctacagtag

SEQ ID NO: 112 - DNA, 465 bp, Torque teno virus
atgtacttttccagaaaaagaagacccaagaaggagaggccgctgccactgcgatacgtgtgtggcctaccgcctagcaggcctgatccgatgagctggcgtccacctgcccacgatgtcccaggacaagagggcctgtggtaccgatcagtttttacttctcatggcgctttttgtggttgcggtgattttgtgggtcatcttcagagacttagcgaacgcctgggtagaccccaaccaccaagaccaccgggcggaccgccgggccctgctgtgagagctctgcctgccctgccgcctccggagcctgaaccaagaagacacgtccagagagagaacccgggatgtggtggtggagacgccgcagatggagggccccatggagaaggaggcgatggagacgacgcagacctcggaccagaagatttagacgagctgctcgacgtcctagacgccccagagtaa

SEQ ID NO: 113 - DNA, 669 bp, Torque teno virus
atgtggtggtggagacgccgcagatggagggccccatggagaaggaggcgatggagacgacgcagacctcggaccagaagatttagacgagctgctcgacgtcctagacgccccagagtaaggagacctcggcgccgcagggggtgggctcgtagatatagacttagaaggaggcggaggaggagaagaaggagaaagcttatactaacacaatggcagccagcaaaaataagaaaatgtctagtaataggttatcttgctctagtactatgtggaaacgggacattcagtaaaaactatgcctcgcactcagatgactatgtacagaaaggaccctttggagggggactaagcagcatgagatttaacatgagaatactatatgatcaatttaaaagacaccttaacttctggacacacacaaaccaggacctagacctagttagatacagaggctgcaccatgacattttatagacacccagaggtggacttcatagtaaaattcaacagaaaacctccattcctagacacaatagtatcaggtccagccatgcacccaggcatgctaatgacaacaaaacacaaaatactagtaaaaagctttaaaacaaaacccaaaggaaaaggcacagtaaaggtacgcattcgccccccccacactctttga

SEQ ID NO: 114 - DNA, 1239 bp, Torque teno virus
atgataaagtgccccccagcagtaaaagccttagaacattcagacgtaaacagaaactgctacaaaaaactagacagcgcctggggagacactatatggaaccagaacaccatacagaactttaaagaaaacacagacaagttgtgggaagcaagaggcaaccaaacaatgactggtagcaaatacctaaactacagaacaggaatatacagtgccatattcctttcagcaggcagactgtcaccagactttgggggactatacaatgacatagtatacaatcccaccacaggcgaaggcatagaaaacattgtgtggatagactggtgtacaaaagcagactgcaacttcaatgagacacagtccaaaggagtaataaaagacattccactgtgggcagcactgtttggctatgtagactttctaaaaaagacatttaaagacgaacagctagacaaaattgccagactcactctcataagcccctatacaaagcctcaactaataggacctacacaacccaacaaagggtttgttccgtacgactacaactttggcagagcacacatgccctccggagaatcctacatacctatgtactacagatttagatggtacacctgcctatttcaccaacaaaagtctatagacgacattgtaagcagcgggcccttcgcataccacggctcacagccctcagcaactctcaccactaaatacaaattccactttctctttgggggcaaccccgttccccaacagactgtcagagacccttgtaaccaaccaatctttgacattcccggagccggtggactccctcgtccgatacaagtcgttgacccgaaatacgtcaacgaaggctacacgttccacgcctgggacttccgtagagggctctttggccaagcagctattaaaagagtgtcgggagaacaaacaaatgcttcactttattcatcaggtccaaaacggccaagaacagaaattcctccacaaaatgcagaagaaggctcatattccagggaacaaaaactccagccctggctcgactcgagcgaccaggaagaaagcgagacagaagccccagaagaagaagcgacctcgccaccgtcgctacagctccagctcaagcagcagatcagggagcagcgacaactcagatgtggaatccaacacctcttccagcaactagtgaaaacccagcaaaacttgcatatcaacccatgcctacaatag

SEQ ID NO: 115 - DNA, 465 bp, Torque teno virus
atgtacttttccagaaaaagaagacccaagaaggagaggccgctgccactgcgatacgtgtgtggcctaccgcctagcaggcctgatccgatgagctggcgtccacctgcccacgatgtcccaggacaagagggcctgtggtaccgatcagtttttacttctcatggcgctttttgtggttgcggtgattttgtgggtcatcttcagagacttagcgaacgcctgggtagaccccaaccaccaagaccaccgggcggaccgccgggccctgctgtgagagctctgcctgccctgccgcctccggagcctgaaccaagaagacacgtccagagagagaacccgggatgtggtggtggagacgccgcagatggagggccccatggagaagaaggcgatggagacgacgcagacctcgggccagaagatttagacgagctgctcgacgtcctagacgccccagagtaa

SEQ ID NO: 116 - DNA, 2163 bp, Torque teno virus
atgtggtggtggagacgccgcagatggagggccccatggagaagaaggcgatggagacgacgcagacctcgggccagaagatttagacgagctgctcgacgtcctagacgccccagagtaaggagacctcggcgccgcagggggtgggctcgtagatatagacttagaaggaggcggaggaggagaagaaggagaaagcttatactaacacaatggcagccagcaaaaataagaaaatgtctagtaataggttatctcgctctagtactatgtggaaacgggacattcagtaaaaactatgccacgcactcagatgactatgtacagaaaggaccctttggagggggactaagcagcatgagatttaacatgagaatactatatgatcaatttaaaagacaccttaacttctggacacacacaaaccaggacctagacctagttagatacagaggctgcaccatgacattttatagacacccagaggtggacttcatagtaaaattcaacagaaaacctccattcctagacacaatagtatcaggtccagccatccacccaggcatgctaatgacaacaaaacacaaaatactagtaaaaagctttaaaacaaaacccaaaggaaaaggcacagtaaaggtgcgcattcgcccccccacactctttgacgaccgttggtactttcaacatgacatctgcaaaaccacactgttcaccattagcgcaacaccatgtgacctgcggtttccgttctgctcaccacaaactgacaacccttgcgtcaacttcctagttcttgcaggagtgtataacggcaaacttagcatagaagccacaaagttagaatcacaatataattcactagtttcatctatagaaatacccacccaaggcactctatttaatacatttaaaacaccagaaatgataaagtgccccccagcagtaaaagccttagaacattcagacgtaaacagaaactgctacaaaaaactagacagcgcctggggagacactatatggaaccagaacaccatacagaactttaaagaaaacacagacaagttgtgggaagcaagaggcaaccaaacaatgactggtagcaaatacctaaactacagaacaggaatatacagtgccatattcctttcagcaggcagactgtcaccagactttgggggactatacaatgacatagtatacaatcccaccacagacgaaggcataggaaacattgtgtggatagactggtgtacaaaagcagactgcaacttcaatgagacacagtccaaaggagtaataaaagacattccactgtgggcagcactgtttggctatgtagactttctaaaaaagacatttaaagacgaacagctagacaaaattgccagactcactctcataagcccctatacaaagcctcaactaataggacctacacaacccaacaaagggtttgttccgtacgactacaactttggcagagcacacatgccctccggagaatcctacatacctatgtactacagatttagatggtacatctgcctatttcaccaacaaaagtttatagacgacattgtaagcagcgggcccttcgcataccacggctcacagccctcagcaactctcaccactaaatacaaattccactttctctttgggggcaaccccgttccccaacagactgtcagagacccttgtaaccaaccagtctttgacattcccggagccggtggactcccccgtccgatacaagtcgttgacccgaaatacgtcaacgaaggctacacgttccacgcctgggacttccgtagagggctctttggccaagcagctattaaaagagtgtcgggagaacaaacaaatgcttcactttattcatcaggtccaaaacggccaagaacagaaattcctccacaaaatgcagaagaaggctcatattccagggaacaaaaactccagccctggctcgactcgagcgaccaggaagagagcgagacagaagccccagaagaagaagcgacctcgccaccgtcgctacagctccagctcaagcagcagatcagggagcagcgacaactcagatgtggaatccaacacctcttccagcaactagtgaaaacccagcaaaacttgcatatcaatccatgcctacagtag

SEQ ID NO: 117 - DNA, 465 bp, Torque teno virus
atgtacttttccagaaaaagaagacccaagaaggagaggccgctgccactgcgatacgtgtgtggcctaccgcctagcaggcctgatccgatgagctggcgtccacctgcccacgatgtcccaggacaagagggcctgtggtaccgatcagtttttacttctcatggcgctttttgtggttgcggtgattttgtgggtcatcttcagagacttagcgaacgcctgggtagaccccaaccaccaagaccaccgggcgaaccgccgggccctgctgtgagagttctgcctgccctgccgcctccggtacctgaaccaagaagacacgtccagagagagaacccgggatgtggtggtggagacgccgcagatggagggccccatggagaaggaggcgatggagacgacgcagacctcggaccagaagatttagacgagctgctcgacgtcctagacgccccagagtaa

SEQ ID NO: 118 - DNA, 2163 bp, Torque teno virus
atgtggtggtggagacgccgcagatggagggccccatggagaaggaggcgatggagacgacgcagacctcggaccagaagatttagacgagctgctcgacgtcctagacgccccagagtaaggagacctcggcgccgcagggggtgggctcgtagatatagacttagaaggaggcgaaggaggagaagaaggagaaagcttatactaacacaatggcagccagcaaaaataagaaaatgtctagtaataggttatcttgctctagtactatgtgggaacgggacattcagtaaaaactatgcctcccactcagatgactatgtacagaaaggaccctttggagggggactaagcagcatgagatttaacatgagaatactatatgatcaatttaaaagacaccttaacttctggacacacacgaaccaggacctagacctagttagatacagaggctgcaccatgacattttatagacacccagaggtggacttcatagtaaaattcaacagaaaacctccattcctagacacaatagtatcaggtccagccatgcacccaggcatgctaatgacaacaaaacacaaaatactagtaaaaagctttaaaacaaaacccaaaggaaaaggcacagtaaaggtgcgcattcgcccccccacactctttgacgaccgttggtactttcaacatgacatctgcaaaaccacactgttcaccattagcgcaacaccatgtgacctgcggtttccgttctgctcaccacaaactgacaacccttgcgtcaacttcctagttcttgcaggagtgtataacggcaaacttagcatagaacccacaaacgtagaatcacaatataattcactactttcagctatagagacgaacacccaaggcactctatttaatacatttaaaacaccagaaatgataaagtgccccgcagcaggaaaagccccagaaactggagacatatccacaaactgctacaaaaaactagacagcgcctggggagacactatatggaaccaaaacaccatagccaactttaaaaagaacacagacaacttgtggaatgcaggacacaatcaaacaatgactggtagcaaatacctaaactacagaacaggaatatacagtgccatattcctttcagcaggcagactgtcaccagactttccaggactatacgatgacatagtatacaatcccaccacagacgaaggcataggaaacattgtgtggatagactggtgtacaaaagcagactgcaacttcaatgagacacagtccaaaggagtaataaaagacattccactgtgggcagcactgtttggctatgtagactttctaaaaaagacatttaaagacgaccagctagacaaaactgccagactcactctcataagcccctatacaaagcctcaactaataggacctacacaacccaacaaagggtttgttccgtacgactacaactttggcagagcacacatgccctccggagaatcctacatacctatgtactacagatttagatggtacatctgcctatttcaccaacaaaagtttatagacaacattgtaagcagcgggcccttcgcataccacggctcacagccctcagcaactctcaccactaaatacaaattccactttctctttgggggcaaccccgttccccaacagactgtcagagacccttgtaaccaaccagtctttgacattcccggagccggtggactccctcgtccgatacaagtcgttgacccgaaatacgtcaacgaaggctacacgttccacgcctgggacttccgtagagggctctttggccaagcagctattaaaagagtgtcgggagaacaaacaaatgcttcactttattcatcaggcccaaaacggccaagaacagaaattcctccagaaaatgcagaagaaggctcatattccagggaacaaaaactccagccctggctcgactcgagcgaccaggaagggagcgagacagaagccccagaagaagaagcgacctcgccgccgtcgctacagctccagctcaagcagcagatcagggagcagcgacaactcagatgtggaatccaacacctcttccagcaactagtgaaaacccagcaaaacttgcatatcaacccatgcctacaatag

SEQ ID NO: 119 - DNA, 465 bp, Torque teno virus; identical to SEQ ID NO: 112

SEQ ID NO: 120 - DNA, 2163 bp, Torque teno virus
atgtggtggtggagacgccgcagatggagggccccatggagaaggaggcgatggagacgacgcagacctcggaccagaagatttagacgagctgctcgacgtcctagacgccccagagtaaggagacctcggcgccgcagggggtgggctcgtagatatagacttagaaggaggcggaggaggagaagaaggagaaagcttatactaacacaatggcagccagcaaaaataagaaaatgtctagtaataggttatcttgctctagtactatgtggaaacgggacattcagtaaaaactatgcctcgcactcagatgactatgtacagaaaggaccctttggagggggactaagcagcatgagatttaacatgagagtactatatgatcaatttaaaagacaccttaacttctggacacacacaaaccaggacctagacctagttagatacagaggctgcaccatgacattttatagacacccagaggtggacttcatagtaaaattcaacagaaaacctccattcctagacacaatagtatcaggtccagccatgcacccaggcatgctaatgacaacaaaacacaaaatactagtaaaaagctttaaaacaaaacccaaaggaaaaggcacagtaaaggtgcgcattcgcccccccacactctttgacggccgttggtactttcaacatgacatctacaaaaccacactgttcaccattagcgcaacaccgtgtgacctgcggtttccgttctgctcaccacaaactgacaacccttgcgtcaacctcctagttcttgcaggagtgtataacggcaaacttagcatagaagccacaaagttagaatcacaatataattcactagtttcatctatagaaatacccacccaaggcactctatttaatacatttaaaacaccagaaatgataaagtgccccccagcagtaaaagcctcagaacattcagacgtaaacagaaactgctacaaaaaactagacagcgcctggggagacactatatggaacccgagcaccatacagaactttaaagaaaacacagagaagttgtgggaagcaagaggcaaccaaacaatgactggtagcaaatacctaaactacagaacaggaatatacagtgccatattcctttcagcaggcagactgtcaccagactttgggggactatacaatgacatagtatacaatcccaccacagacgaaggcataggaaacattgtgtggatagactggtgtacaaaagcagactgcaacttcaatgagacacagtccaaaggggtaataaaagacattccaccgtgggcagcactgtttggctatgtagactttctaaaaaagacatttaaagacgaacagctagacaaaattgccagactcactctcataagcccctatacaaagcctcaactaataggacctacacaacccaacaaagggtttgttccgtacgactacaactttggcagagcacacatgccctccggagaatcctacatacctatgtactacagatttagatggtacatctgcctatttcaccaacaaaagtttatagacgacattgtaagcagcgggcccttcgcataccacggctcacagccctcagcaactctcaccactaaatacaaattccactttctctttgggggcaaccccgttccccaacagactgtcagagacccttgtaaccaaccagtctttgacattcccggagccggtggactccctcgtccgatacaagtcgttgacccgaaatacgtcaacgaaggctacacgttccacgcctgggacttccgtagagggctctttggccaagcagctattaaaagagtgtcgggagaacaaacaaatgcttcactttattcatcaggtccaaaacggccaagaacagaaattcctccacaaaatgcagaagaaggctcatattccagggaacaaaaactccagccctggctcgactcgagcgaccaggaagagagcgagacagaagccccagaagaagaagcgacctcgccaccgtcgctacagctccagctcaagcagcagatcagggagcagcgacaactcagatgtggaatccaacacctcttccagcaactagtgaaaacccagcaaaacttgcatatcaacccatgcctacaatag

SEQ ID NO: 121 - DNA, 447 bp, Torque teno virus
atgcgttttcgcagggttgcccagaaaaggaaagtgcttttgcaaactgtgccagctgcaaagaaggctaggcggcttctaggtatgtggcagccccccacgcacaatgtcccgggcatcgagagaaactggtacgagagctgttttagatcccacgctgctgtttgtggctgtggcgattttgttggccatcttaatcatctggcaactactctgggtcgtcctccgcgtcctgggcccccaggcggaccccgcacgccgcaaataagaaacctgccagcgctcccggcgccccagggcgagcccggtgacagagcgtcatggcgtggggcttctggggccgacgccgccggtggagacgatggagagcgcggcgcagacggtggagaccccgcagacgtaggagacgacgccctcctcgccgctttcgagctcgtcgaagagtaa

SEQ ID NO: 122 - DNA, 2211 bp, Torque teno virus
atggcgtggggcttctggggccgacgccgccggtggagacgatggagagcgcggcgcagacggtggagaccccgcagacgtaggagacgacgccctcctcgccgctttcgagctcgtcgaagagtaaggaggcgcggggggaggtggcgcagacgctacagaaaatggcgacggggcagacgcagacggactcacagaaaaaagatagtcataaaacagtggcaacctaactttataagacgctgctacatcatagggtacttaccacttatattctgcggcgaaaatacaaccgcccagaactttgccactcactcggacgacatgataagcaaaggaccgtacggggggggcatgactaccaccaaattcactctgagaatactgtacgacgagtttaccaggtttatgaacttttggactgtcagtaacgaagacctagacctgtgtagatacgtgggctgcaaactaatattttttaaacaccccacggtggactttatagtacagataaacactcagcctcctttcttagacacgcacctcaccgcggccagcatacacccgggcatcatgatgctcagcaagagacacatactaataccctctctaaagacccggcccagcagaaaacacagggtggtcgtcagggtgggcgccccaagactttttcaggacaagtggtacccccagtcagacctgtgtgacacagttctgctttccatattcgcaaccgcctgcgacttgcaatatccgttcggctcaccactaactgacaacccttgcgtcaacttccagatcctggggccccagtacaaaaaacaccttagtattagctccactatggatgacactaacaaagcacattatgaagaaaacttatttaagaaaattgaactatacaacacctttcaaaccatagctcagcttaaagagacaggaacaatttcaggcatgcaaccttcttggactgaagtccagaattcaaaaacacttaatgaaacaggtagcaatgccactgagagtagagacacttggtataaaggaaatacatacaacgacaagatacaccagttagcagaaaaaaccagaaagagatttaaaaatgcaacaaaagcagcactaccaaactaccccacaataatgtccgcagacttatatgaataccactcaggcatatactccagcatatatctatcagctggcaggagctactttgaaaccaccggggcctactctgacattatatacaaccctttcacagacaagggcacaggcaacataatctggatagactacctcacaaaagaagacaccatttttgtaaaaaacaaaagcaaatgcgagataatggacatgcccctgtgggcggcctgcacaggatacacagagttttgtgcaaagtatacaggcgactctgccattatttacaatgcaagaatagtcataagatgcccatacactgagcccatgttaatagaccactcagacccaaacaaaggcttcgttccctactcatttagctttggcaacggaaagatgcccggaggcagctccaacgtgcccataagaatgagagccaagtggtacgtgaacatattccaccaaaaagaagtattggagagcatagtacagtccggaccgtttgggtacaagggcgacataaaatcagctgtactagccatgaaatacagatttcactggaagtggggcggaaaccctatatccaaacaggtcgtcaggaatccctgctccaactccagctcatccgcggcccatagaggacctcgcagcgtacaagcggttgacccgaaatacaataccccagaggtcacgtggcactcgtgggacattagacgaggactctttggcaaagcaggtattaaaagaatgcaacaggaatcagatgctctttacattcctccaggaccaatcaagagacctcgcagggacaccaacgcccaagacccagaagagcaaaacgaaagctcaggtttcagagtccagcagcgactcccgtgggtccactccagccaagagacgcaaagctcccaagaagagacggaggcgcaggggtcggtacaagaccaactactcctccagctccgagagcagcgagttctccgactccagctccagcaactcgcaacccaagtcctcaaagtccaagcagggcacagcctacaccccctattatcttcccaagcataa

SEQ ID NO: 123 - DNA, 447 bp, Torque teno virus
atgcgttttcgcagggttgcccagaaaaggaaagtgcttttgcaaactgtgccagctgcaaagaaggctaggcggcttctaggtatgtggcagccccccacgcataatgtcccgggcatcgagagaaactggtacgagagctgttttagatcccacgctgctgtttgtggctgtggcgattttgttggccatcttaatcatctggcaactactctgggtcgtcctccgcgtcctgggcccccaggcggaccccgcacgccgcaaataagaaacctgccagcgctcccggcgccccagggcgagcccggtgacagagcgtcatggcgtggggcttctggggccgacgccgccggtggagacgatggagagcgcggcgcagacggtggagaccccgcagacgtaggagacgacgccctcctcgccgctttcgagctcgtcgaagagtaa

SEQ ID NO: 124 - DNA, 2211 bp, Torque teno virus
atggcgtggggcttctggggccgacgccgccggtggagacgatggagagcgcggcgcagacggtggagaccccgcagacgtaggagacgacgccctcctcgccgctttcgagctcgtcgaagagtaaggaggcgcggggggaggtggcgcagacgctacagaaaatggcgacggggcagacgcagacggactcacagaaaaaagatagtcataaaacagtggcaacctaactttataagacgctgctacatcatagggtacttaccacttatattctgcggcgaaaatacaaccgcccagaactttgccactcactcggacgacatgataagcaaaggaccgtacggggggggcatgactaccaccaaattcactctgagaatactgtacgacgagtttaccaggtttatgaacttttggactatcagtaacgaagacctagacctgtgtagatacgtgggctgcaaactaatattttttaaacaccccacggtggactttatagtacagataaacactcagcctcctttcttagacacgcacctcaccgcggccagcatacacccgggcatcatgatgctcagcaagagacacatactaataccctctctaaagacccggcccagcagaaaacacagggtggtcgtcagggtgggcgccccaagactttttcaggacaagtggtacccccagtcagacctgtgtgacacagttctgctttccatattcgcaaccgcctgcgacttgcaatatccgtttggctcaccactaactgacaacccttgcgtcaacttccagatcctggggccccagtacaaaaaacaccttagtattagctccactatggatgaaagtaacatatcacattataaagaaaacttatttaagaaaactgaactatacaacacctttcaaaccatagctcagcttaaagagacaggaaacatttcaggcattagtcctaattggactgaagtccagaattcaacaacacttaatcaaacaggtgacaatgccactaacagtagagacacttggtataaaggaaatacatacaaccacaagatatgcgacttagcagaaaaaaccagaaacagatttaaaaatgcaaccaaagcagcactaccaaactaccccacaataatgtccacagacctatatgaataccactcaggcatatactccagcatatatttatcagctggcaggagctactttgaaaccaccggggcctactctgacattatatacaaccctttcacagacaaaggcacaggcaacataatctggatagactacctcacaaaagaagacaccatttttgtaaaaaacaaaagcaaatgcgagataatggacatgcccctgtgggcggcctgcacaggatacacagagttttgtgcaaagtatacaggcgactctgccattatctacaatgcaagaatactcataagatgcccatacactgagcccatgttaatagaccactcagacccaaacaaaggcttcgttccctactcatttaactttggcaacggaaagatgcccggaggcagctccaacgtacccataagaatgagagccaaatggtacgcgaacatattccaccaaaaggaggttctagaggctatagtacaaagcggaccgttcgggtacaagggcgacataaaatcagctgtactagccatgaaatacagatttcactggaagtggggcggaaaccctatatccaaacaggtcgtcaggaatccctgctccaactccagctcatccgcggcccatagaggacctcgcagcgtacaagcggttgacccgaaatacaataccccagaggtcacgtggcactcgtgggacattagacgaggactctttggcaaagcaggtattaaaagaatgcaacaggaatcagatgctctttacattcctccaggaccaatcaagagacctcgcagggacaccaacgcccaagacccagaagagcaaaacgaaagctcaggtttcagagtccagcagcgactcccgtgggtccactccagccaagagacgcaaagctcccaagaagagacggaggcgcaggggtcggtacaagaccaactactcctccagctccgagagcagcgagttctccgactccagctccagcaactcgcagcccaagtccccaaagtccaagcagggcacagcctacaccccctattatcttcccaagcataa

SEQ ID NO: 125 - DNA, 447 bp, Torque teno virus; identical to SEQ ID NO: 121

SEQ ID NO: 126 - DNA, 2211 bp, Torque teno virus
atggcgtggggcttctggggccgacgccgccggtggagacgatggagagcgcggcgcagacggtggagaccccgcagacgtaggagacgacgccctcctcgccgctttcgagctcgtcgaagagtaaggaggcgcggggggaggtggcgcagacgctacagaaaatggcgacggggcagacgcagacggactcacagaaaaaagatagtcataaaacagtggcaaccaaactttataagacgctgctacatcatagggtacttaccacttatattctgcggcgaaaatacaaccgcccagaactttgccactcactcggacgacatgataagcaaaggaccgtacggggggggcatgactaccaccaaattcactctgagaatactgtacgacgagtttaccaggtttatgaacttttggactgtcagtaacgaagacctagacctgtgtagatacgtgggctgcaaactaatattttttaaacaccccacggtggactttatagtacagataaacactcagcctcctttcttagacacgcacctcaccgcggccagcatacacccgggcatcatgatgctcagcaagagacacatactaataccctctctaaagacccggcccagcagaaaacacagggtggtcgtcagggtgggcgccccaagactttttcaggacaagtggtacccccagtcagacctgtgtgacacagttctgctttccatattcgcaaccgcctgcgacttgcaatatccgttcggctcaccactaactgacaacccttgcgtcaacttccagatcctggggccccagtacaaaaaacaccttagtattagctccactatggatgacactaacaaagcacattatgaagaaaacttatttaataaaactgaactatacaacacctttcaaaccatagctcagcttagagacacaggacaaactacaaacgctagtcctaattggaatcaggtccagaatacagcagcacttgagttatcaggtgcaaatgccactagcagcaaagacacttggtataaaggtaatacatacacgaaagacatatcaaagttagcagaaaaaaccagacaaagatttaaagctgcaacaatagcagcactaccaaactaccccacaataatgtccacagacctatatgaataccactcaggcatatactccagcatatatttatcagctggcaggagctactttgaaaccaccggggcctactctgacattatatacaaccctttcacagacaaaggcacaggcaacataatctggatagactacctcacaaaagaagacaccatttttgtaaaaaacaaaagcaaatgcgagataatggacatgcccctgtgggcggcctgcacaggatacacagagttttgtgcaaagtatacaggcgactctgccattatctacaatgcaagaatactcataagatgcccacacactgagcccatgttaatagaccactcagacccaaacaaaggcttcgttccctactcattcgactttggcaatggaaagatgcccggaggcagctccaacgtaccgataagaatgagggccaaatggtacgtgaacatattccaccaaaaggaggttctagaggctatagtacaaagcggaccgttcgggtacaagggcgacataaaatcagctgtactagccatgaaatacagatttcactggaagtggggcggaaaccctatatccaaacaggtcgtcaggaatccctgctccaactccagctcatccgcggcccatagaggacctcgcagcgtacaagcggttgacccgaaatacaataccccagaggtcacgtggcactcgtgggacattagacgaggactctttggcaaagcaggtattaaaagaatgcaacaggaatcagatgctctttacattcctccaggaccaatcaagagacctcgcagggacaccaacgcccaagacccagaagagcaaaacgaaagctcaggtttcagagtccagcagcgactcccgtgggtccactccagccaagagacgcaaagctcccaagaagagacggaggcgcaggggtcggtacaagaccaactactcctccagctccgagagcagcgagttctccgactccagctccagcaactcgcaacccaagtcctcaaagtccaagcagggcacagcctacaccccctattatcttcccaagcataa

SEQ ID NO: 127 - DNA, 447 bp, Torque teno virus
atgcgttttcgcagggttgcccagaaaaggaaagtgcttttgcaaactgtgccagctgcaaagaaggctaggcggcttctaggtatgtggcagccccccacgcacaatgtcccgggcatcgagagaaactggtacgagagctgttttagatcccacgctgctgtttgtggctgtggcgattttgttggccatcttaatcatctggcaactactctgggtcgtcctccgtgtcctgggcccccaggcggaccccgcacgccgcaaataagaaacctgccagcgctcccggcgccccagggcgagcccggtgacagagcgccatggcgtggggcttctggggccgacgccgccggtggagacgatggagagcgcggcgcagacggtggagaccccgcagacgtaggagacgacgccctactcgccgctttcgagctcgtcgaagagtaa

SEQ ID NO: 128 - DNA, 2211 bp, Torque teno virus
atggcgtggggcttctggggccgacgccgccggtggagacgatggagagcgcggcgcagacggtggagaccccgcagacgtaggagacgacgccctactcgccgctttcgagctcgtcgaagagtaaggaggcgcggggggaggtggcgcagacgctacagaaaatggcgacggggcagacgcagacggactcatagaaaaaagatagtcataaaacagtggcaaccaaactttataagacgctgctacatcatagggtacttaccacttatattctgcggcgaaaatacaaccgcccagaactttgccactcgctcggacgacatgataagcaaaggaccgtacggggggggcatgactaccaccaaattcactctgagaatactgtacgacgagtttaccaggtttatgaacttttggactgtcagtaacgaagacctagacctgtgtagatacgtgggctgcaaactaatattttttaaacaccccacggtggactttatagtacagataaacactcagcctcctttcttagacacgcacctcaccgcggccagcatacacccgggcatcatgatgctcagcaagagacacatactaataccctctctaaagacccggcccagcagaaaacacagggtggtcgtcagggtgggcgccccaagactttttcaggacaagtggtacccccagtcagacctgtgtgacacagttctgctttccatattcgcaaccgcctgcgacttgcaatatccgttcggctcaccactaactgacaacccttgcgtcaacttccagatcctggggccccagtacaaaaaacaccttagtattagctccactatggatgaaagtaacaaagcacattatgaacaaaacttatttaagaaaactgaactatacaacacctttcaaaccatagctcagcttaaagagacaggaaacatttcaggcattactcctacttggactgaagtccagaattcaacaacacttaatcaagcaggtaacaatgccactgacagtagagacacttggtataaaggaaatacatacaacgagaagatatccgagttagcacaaataaccagaaacagatttaaaaatgcaaccaaaacagcactaccaaactaccccacaataatgtccacagacctatatgaataccactcaggcatatactccagcatatatttatcagctggcaggagctactttgaaaccaccggggcctactctgacattatatacaaccctttcacagacaaaggcacaggcaacataatctggatagactacctcacaaaagaagacaccatttttgtaaaaaacaaaagcaaatgcgagataatggacatgcccctgtgggcggcctgcacaggatacacagagttttgtgcaaagtatacaggcgactctgccattatttacaatgcaagaatagtcataagatgcccatacactgagcccatgttaatagaccactcagacccaaacaaaggcttcgtcccctactcatttaactttggcaacggaaagatgcccggaggcagctccaacgtgcccataagaatgagagccaagtggtacgtgaacatattccaccaaaaagaagtattggagagcatagtacagtccggaccgtttgggtacaagggcgacataaaatcagctgtactagccatgaaatacagatttcactggaagtggggcggaaaccctatatccaaacaggtcgtcaggaatccctgctccaactccagctcatccgcggcccatagaggacctcgcagcgtacaagcggttgacccgaaatacaataccccagaggtcacgtggcactcgtgggacattagacgaggactctttggcaaagcaggtattaaaagaatgcaacaggaatcagatgctctttacattcctccaggaccaatcaagagacctcgcagggacaccaacgcccaagacccagaagagcaaaacgaaagctcaggtttcagagtccagcagcgactcccgtgggtccactccagccaagagacgcaaagctcccaagaagagacggaggcgcaggggtcggtacaagaccaactactcctccagctccgagagcagcgagttctccgactccagctccagcaactcgcaacccaagtcctcaaagtccaagcagggcacagcctacaccccctattatcttcccaagcataa

SEQ ID NO: 129 - DNA, 447 bp, Torque teno virus
atgcgttttcgcagggttgcccagaaaaggaaagtgcttttgcaaactgtgccagctgcaaagaaggctaggcggcttctaggtatgtggcagccccccacgcacaatgtcccgggcatcgagagaaactggtacgagagctgttttagatcccacgctgctgtttgtggctgtggcgattttgttggccatcttaatcatctggcaactactctgggtcgtcctccgcgtcctgggcccccaggcggaccccgcacgccgcaaataagaaacctgccagcgctcccggcgccccagggcgagcccggtgacagagcgccatggcatggggcttctggggccgacgccgccggtggagacgatggagagcgcggcgcagacggtggagaccccgcagacgtaggagacgacgccctactcgccgctttcgagctcgtcgaagagtaa

SEQ ID NO: 130 - DNA, 2211 bp, Torque teno virus
atggcatggggcttctggggccgacgccgccggtggagacgatggagagcgcggcgcagacggtggagaccccgcagacgtaggagacgacgccctactcgccgctttcgagctcgtcgaagagtaaggaggcgcggggggaggtggcgcagacgctacagaaaatggcgacggggcagacgcagacggactcatagaaaaaagatagtcataaaacagtggcaaccaaactttataagacgctgctacgtcatagggtacttaccacttatattctgcggcgaaaatacaaccgcccagaactttgccactcactcggacgacatgataagcaaaggaccgtacggggggggcatgactaccaccaaattcactctgagaatactgtacgacgagtttaccaggtttatgaacttttggactgtcagtaacgaagacctagacctgtgtagatacgtgggctgcaaactaatattttttaaacaccccacggtggactttatagtacagataaacactcagcctcctttcttagacacgcacctcaccgcggccagcatacacccgggcatcatgatgctcagcaagagacacatactaataccctctctaaagacccggcccagcagaaaacacagggtggtcgtcagggtgggcgccccaagactttttcaggacaagtggtacccccagtcagacctgtgtgacacagttctgctttccatatttgcaaccgcctgcgacttgcaatatccgttcggctcaccactaactgacaacccttgcgtcaacttccagatcctggggccccagtacaaaaaacaccttagtattagctccactatggatcaaactaacgaaaaccattataaagaaaacttatttaacaaaactgaactatacaacacctttcaaaccatagctcagcttaaagagacaggacacatttcaggcattagtcctacttggaatgaagtccagaattcaacaacacttactaaaggaggtgacaatgccactcagagtagagacacttggtataaaggaaatacatacaacgagaagatatgcgagttagcacaaataaccagaaacagatttaaaaatgcaaccaaaggagcactaccaaactaccccacaataatgtccacagacctatatgaataccactcaggcatacactccagcatatatctatcagctggcaggagctactttgaaaccaccggggcctactctgacattatatacaaccctttcacagacaaaggcacaggcaacataatctggatagactacctcacaaaagaagacaccatttttgtgaaaaacaaaagcaaatgcgagataatggacatgcccctgtgggcggcctgcacaggatacacagagttttgtgcaaagtatacaggcgactctgccattatctacaatgcaagaatactcataagatgcccatacactgagcccatgttaatagaccactcagacccaaacaaaagcttcgttccctactcatttaactttggcaacggaaagatgcccggaggcagctccaacgtgcccataagaatgagagccaagtggtacgtgaacatattccaccaaaaagaagtattagagagcatagtacagtccggaccgtttgggtacaagggcgacataagatcagctgtactagccatgaaatacagatttcactggaagtggggcggaaaccctatatccaaacaggtcgtcaggaatccctgctccaactccagctcctccgcggcccatagaggacctcgcagcgtacaagcggttgacccgaaatacaataccccagaggtcacgtggcactcgtgggacattagacgaggactctttggcaaagcaggtattaaaagaatgcaacaggaatcagatgctctttacattcctccaggaccaatcaagagacctcgcagggacaccaacgcccaagacccagaagagcaaaacgaaagctcaggtttcagagtccagcagcgactcccgtgggtccactccagccaagagacgcaaagctcccaagaagagacggaggcgcaggggtcggtacaagaccaactactcctccagctccgagagcagcgagttctccgactccagctccagcaactcgcaacccaagtcctcaaagtccaagcagggcacagcctacaccccctattatcttcccaagcataa

SEQ ID NO: 131 - DNA, 447 bp, Torque teno virus; identical to SEQ ID NO: 129

SEQ ID NO: 132 - DNA, 2211 bp, Torque teno virus
atggcatggggcttctggggccgacgccgccggtggagacgatggagagcgcggcgcagacggtggagaccccgcagacgtaggagacgacgccctactcgccgctttcgagctcgtcgaagagtaaggaggcgcggggggaggtggcgcagacgctacagaaaatggcgacggggcagacgcagacggactcatagaaaaaagatagtcataaaacagtggcaaccaaactttataagacgctgctacatcatagggtacttaccacttatattctgcggcgaaaatacaaccgcccagaactttgccactcactcggacgacatgataagcaaaggaccgtacggggggggcatgactaccaccaaattcactctgagaatactgtacgacgagtttaccaggtttatgaacttttggactgtcagtaacggagacctagacctgtgtagatacgtgggctgcaaactaatattttttaaacaccccacggtggactttatagtacagataaacactcagcctcctttcttagacacgcacctcaccgcggccagcatacacccgggcatcatgatgctcagcaagagacacatactaataccctctctaaagacccggcccagcagaaaacacagggtggtcgtcagggtgggcgccccaagactttttcaggacaagtggtacccccagtcagacctgtgtgacacagttctgctttccatatttgcaaccgcctgcgacttgcaatatccgttcggctcaccactaactgacaacccttgcgtcaacttccagatcctggggccccagtacaaaaaacaccttagtattagctccactatggatcaaactaacgaaaaccattataaagaaaacttatttaacaaaactgaactatacaacacctttcaaaccatagctcagcttaaagagacaggacacatttcaggcattagtcctacttggaatgaagtccagaattcaacaacacttactaaagaaggtgacaatgccactcagagtagagacacttggtataaaggaaatacatacaacggtaagatatgccagttagcacaaataaccagaaacaggtttaaaaatgcaaccaaaggagcactaccaaactaccccacaataatgtccacagacctatatgaataccactcaggcatatactccagcatatgtctatcagctggcaggagctactttgaaaccaccggggcctactctgacattatatacaaccctttcacagacaaaggcacaggcaacataatctggatagactacctcacaaaagaagacaccatttttgtgaaaaacaaaagcaaatgcgagataatggacatgcccctgtgggcggcctgcacaggatacacagagttttgtgcaaagtatacaggcgactctgccattatctacaatgcaagaatactcataagatgcccatacactgagcccatgttaatagaccactcagacccaaacaaaggcttcgttccctactcatttaactttggcaacggaaagatgcccggaggcagctccaacgtgcccataagaatgagagccaagtggtacgtgaacatattccaccaaaaagaagtattagagagcatagtacagtccggaccgtttgggtacaagggcgacataaaatcagctgtactagccatgaaatacagatttcactggaagtggggcggaaaccctatatccaaacaggtcgtcaggaatccctgctccaactccagctcctccgcggcccatagaggacctcgcagcgtacaagcggttgacccgaaatacaataccccagaggtcacgtggcactcgtgggacattagacgaggactctttggcaaagcaggtattaaaagaatgcaacaggaatcagatgctctttacattcctccaggaccaatcaagagacctcgcagggacaccaacgcccaagacccagaagagcaaaacgaaagctcaggtttcagagtccagcagcgactcccgtgggtccactccagccaagagacgcaaagctcccaagaagagacggaggcgcaggggtcggtacaagaccaactactcctccagctccgagagcagcgagttctccgactccagctccagcaactcgcaacccaagtcctcaaagtccaagcagggcacagcctacaccccctattatcttcccaagcataa

SEQ ID NO: 133 - DNA, 447 bp, Torque teno virus
atgcgttttcgcagggttgcccagaaaaggaaagtgcttttgcaaactgtgccagctgcaaagaaggctaggcggcttctaggtatgtggcagccccccacgcacaatgtcccgggcatcgagagaaactggtacgagagctgttttagatcccacgctgctgtttgtggctgtggcgattttgttggccatcttaatcatctggcaactactctgggtcgtcctccgcgtcctgggcccccaggcggaccccgcacgccgcaaataagaaacctgccagcgctcccggcgccccagggcgagcccggtgacagagcgccatggcatggggcttctggggccgacgccgccggtggagacgatggagagcgcggcgcagacggtggagatcccgcagacgtaggagacgacgccctactcgccgctttcgagctcgtcgaagagtaa

SEQ ID NO: 134 - DNA, 2211 bp, Torque teno virus
atggcatggggcttctggggccgacgccgccggtggagacgatggagagcgcggcgcagacggtggagatcccgcagacgtaggagacgacgccctactcgccgctttcgagctcgtcgaagagtaaggaggcgcggggggaggtggcgcagacgctacagaaaatggcgacggggcagacgcagacggactcatagaaaaaagatagtcataaaacagtggcaaccaaactttataagacgctgctacatcatagggtacttaccacttatattctgcggcgaaaatacaaccgcccagaactttgccactcactcggacgacatgataagcaaaggaccgtacggggggggcatgactaccaccaaattcactctgagaatactgtacgacgagtttaccaggtttatgaacttttggactgtcagtaacgaagacctagacctgtgtagatacgtgggctgcaaactaatattttttaaacaccccacggtggactttatagtacagataaacactcagcctcctttcttagacacgcacctcaccgcggccagcatacacccgggcatcatgatgctcagcaagagacacatactaataccctctctaaagacccggcccagcagaaagcacagggtggtcgtcagggtgggcgccccaagactttttcaggacaagtggtacccccagtcagacctgtgtgacacagttctgctttccatatttgcaaccgcctgcgacttgcaatatccgttcggctcaccactaactgacaacccttgcgtcaacttccagatcctggggccccagtacaaaaaacaccttagtattagctccactatggatcaaactaacgaaaaccattataaagaaaacttatttaacaaaactgaactatacaacacctttcaaaccatagctcagcttaaagagacaggacacatttcaggcattagtcctacttggaatgaagtccagaattcaacaacacttactaaaggaggtgacaatgccactcagagtagagacacttggtataaaggaaatacatacaacgagaacatatgcaagttagcagaggtaaccagaaacagatttaaaaatgcaaccaaaggagcactaccaaactaccccacaataatgtccacagacctatatgaataccactcaggcatatactccagcatatatctatcagcgggcaggagctactttgaaaccaccggggcctactctgacattatatacaaccctttcacagacaaaggcacaggcaacataatctggatagactacctcacaaaagaagacaccatttttgtgaaaaacaaaagcaaatgcgaaataatggacatgcccctgtgggcggcctgcacgggatacacagagttttgtgcaaagtatacaggcgactctgccattatctacaatgcaagaatactcataagatgcccatacactgagcccatgttaatagaccactcagacccaaacaaaggcttcgttccctactcatttaactttggcaacggaaagatgcccggaggcagctccaacgtgcccataagaatgagagccaagtggtacgtgaacatattccaccaaaaagaagtattagagagcatagtacagtccggaccgtttgggtacaagggcgacataaaatcagctgtactagccatgaaatacagatttcactggaagtggggcggaaaccctatatccaaacaggtcgtcaggaatccctgctccaactccagcccctccgcggcccatagaggacctcgcagcgtacaagcggttgacccgaaatacaataccccagaggtcacgtggcactcgtgggacattagacgaggactctttggcaaagcaggtattaaaagaatgcaacaggaatcagatgctctttacattcctccaggaccaatcaagagacctcgcagggacaccaacgcccaagacccagaagagcaaaacgaaagctcaggtttcagggtccagcagcgactcccgtgggtccactccagccaagagacgcaaagctcccaagaagagacggaggcgcaggggtcggtacaagaccaactactcctccagctccgagagcagcgagttctccgactccagctccagcaactcgcaacccaagtcctcaaagtccaagcagggcacagcctacaccccctattatcttcccaagcataa

SEQ ID NO: 135 - DNA, 420 bp, Torque teno virus
atgcgttttcgcagggttgcccagaaaaggaaagtgcttttgcaaactgtgccagctgcaaagaaggctaggcggcttctaggtatgtggcagccccccacgcacaatgtcccgggcatcgagagaaactggtacgagagctgttttagatcccacgctgctgtttgtggctgtggcgattttgttggccatcttaatcatctggcaactactctgggtcgtcctccgcgtcctgggcccccaggcggaccccgcacgccgcaaataagaaacctgccagcgctcccggcgccccagggcgagcccggtgacagagcgtcatggcgtggggcttctggggccgacgccgccggtggagacgatggagagcgcggcgcagacggtggggaccccgcagacgtaggagacgacgccctcctc

SEQ ID NO: 136 - DNA, 2211 bp, Torque teno virus
atggcgtggggcttctggggccgacgccgccggtggagacgatggagagcgcggcgcagacggtggggaccccgcagacgtaggagacgacgccctcctcgccgctttcgagctcgtcgaagagtaaggaggcgcggggggaggtggcgcagacgctacagaaaatggcgacggggcagacgcagacggactcacagaaaaaagatagtcataaaacagtggcaaccaaactttataagacgctgctacatcatagggtacttaccacttatattctgcggcgaaaatacaaccgcccagaactttgccactcactcggacgacatgataagcaaaggaccgtacggggggggcatgactaccaccaaattcactctgagaatactgtacgacgagtttaccaggtttatgaacttttggactgtcagtaacgaagacctagacctgtgtagatacgtgggctgcaaactaatattttttaaacaccccacggtggactttatagtacagataaacactcagcctcctttcttagacacgcacctcaccgcggccagcatacacccgggcatcatgatgctcagcaagagacacatactaataccctctctaaagacccggcccagcagaaaacacagggtggtcgtcagggtgggcgccccaagactttttcaggacaagtggtacccccagtcagacctgtgtgacacagttctgctttccatattcgcaaccgcctgcgacttgcaatatccgttcggctcaccactaactgacaacccttgcgtcaacttccagatcctggggccccagtacaaaaaacaccttagtattagctccactatggatgacactaacaaagcacattatgaagaaaacttatttaataaaactgaactatacaacacctttcaaaccatagctcagcttagagacacaggacaaactgcaaacgctagtcctaattggaatgaggtccagaatacagcagcacttcagttatcaggtgcaaatgccactagcagcaaagacacttggtataaaggtaatacatacacgaaagacatatcaaagttagcagaaaaaaccagacaaagatttaaagctgcaacaatagcagcactaccaaactaccccacaataatgtccacagacctatatgaataccactcaggcatatactccagcatatatttatcagctggcaggagctactttgaaaccaccggggcctactctgacattatatacaaccctttcacagacaaaggcacaggcaacataatctggatagactacctcacaaaagaagacaccatttttgtaaaaaacaaaagcaaatgcgagataatggacatgcccctgtgggcggcctgcacaggatacacagagttttgtgcaaagtatacaggcgactctgccattatctacaatgcaagaatactcataagatgcccatacactgagcccatgttaatagaccactcagacccaaacaaaggcttcgttccctactcatttaactttggcaacggaaagatgcccggaggcagctccaacgtaccgataagaatgagagccaaatggtacgtgaacatattccaccaaaaggaggttctagaggctatagtacaaagcggaccgttcgggtacaagggcgacataaaatcagctgtactagccatgaaatacagatttcactggaagtggggcggaaaccctatatccaaacaggtcgtcaggaatccctgctccaactccagctcatccgcggcccatagaggacctcgcagcgtacaagcggttgacccgaaatacaatacctcagaggtcacgtggcactcgtgggacattagacgaggactctttgacaaagcaggtattaaaagaatgcaacaggaatcagatgctctttacattcctccaggaccaatcaagagacctcgcagggacaccaacgcccaagacccagaagagcaaaacgaaagctcaggtttcagagtccagcagcgactcccgtgggtccactccagccaagagacgcaaagcttccaagaagagacggaggcgcaggggtcggtacaagaccaactactcctccagctccgagagcagcgagttctccgactccagcaccagcaactcgcaacccaagtcctcaaagtccaagcagggcacagcctacaccccctattatcttcccaagcataa

SEQ ID NO: 137 - DNA, 453 bp, Torque teno virus
atgcgtttttccaggattgctcgctcgaaaaggaaagtgccactgccaacactgccaataccaccgccgcctgggactatgagctggcgccctccggtccacaatgccgctggaatcgaccgtaactggttcgaatcctgtttcagatctcacgctagcagttgcggctgtggaaattttattggccatcttaatactctcgctactcgctacggctttactcctgggcccgcgccgccgcctggtggtccaggcccgcggccgccagtaccagtgaggccccggcacctggccggagacggtaaccagcccagggccctgccatggcgtggggatggtggagacgcagacgctggcccacctacagaaggtggcggcgctggagacgccgcaggagagtaccgcgacgaagacctcgaagagctgttcgccgctatggaaagagacgagtaa

SEQ ID NO: 138 - DNA, 2241 bp, Torque teno virus
atggtggagacgcagacgctggcccacctacagaaggtggcggcgctggagacgccgcaggagagtaccgcgacgaagacctcgaagagctgttcgccgctatggaaagagacgagtaaggaggcgccggtggggaggcggcggtaccgaaggggctacagacgcagggtcgcggtcagactgagacgcagacgcagacggggacgtaagagacttgtacttactcagtggcagccccagacccgtagaaagtgcaccatcaccgggtacctcccggtggtatggtgcggctacctccgggccgccaaaaactatgcctaccactctgacgactccacaaagcagccggacccctttgggggcgcgctgagcactacctcctttaaccttaaggtgctgtacgaccagcaccagagaggactcaacaggtggtctttccctaacgaccaactggacctagctcgctacagggggtgcacacttacgttctacagacagaaagccactgactttatagctatttatgacatctccgccccatacaaactagacaagtacagctctcccagctatcaccccggcaacatgataatgcagaaaaagaaaattctcattcccagctacgacactaaccccaggggccgccaaaaaatagtagttaaaatccccccccctaaactgttcgtggataagtggtatgcacaggaggacctgtgcgacgttaatcttgtgacacttgcggtcagcgcagcttcctttacacatccgttcggctcaccactaacgaacaacccttgtgtaaccttccaggtacttgactcaatatactattccgtaataggttacggttcctcagatcagaaaaaaaaacaagtacttgaaactctctataacgaaaatgcatactgggcctcacacttaactccttactttaccactggccttaaaattccatatccagatactaagaatcccagcactactgcatctgttactccaaacacgctatttacaacaggtagctacgactcaaacattaaaatagcaggagacagcaactacaactggtacccctacaaccttaaaaacaaaatagacaaacttcataaaattagagaacaatactttaaatgggaaacagatgaaggcccccaagccacatctgattatggcaaacaccacacttggactaaacccaccgatgactactacgaataccacctaggtttatttagtcccatattcataggacccaccagaagcaacaaactatttgcaaccgcctaccaggacgttacttacaaccccctaaacgacaaggcggtgggaaacaagttctggtttcagtacaacacaaaagcagacacccaggtggccaaacaaggctgctactgcatgctagaagacattcccctctgggccgccatgtatggctactctgactttatagagaccgagctaggccccttccaagacgcagagacggtgggctatatctgtgtaatatgcccctacaccgagccccccatgtacaacaaacacaatcccatgcagggttacgtgttttatgactcgttttttggcaatggcaagtggatagacggacggggacacatagagccttactggctctgccgctggaggccagaaatgcttttccagcagcaggttatgagagacattgtgcagaccgggccctggagctataaagacgaaagcaaaaactgtgttctgcccatgaagtataagttcagattcacatggggcggcaatatggtctcccaacagacaatcagaaacccctgcaagactgacggacaacttgccccctccggtagacagcctagagaagtacaagttgttgacccactcaccatgggtccccgctgggttttccactcctgggactggagacgtggctaccttagtgagacagctctcagacgcctgcgagaaaaaccactcgactatgaggcgtatatgcaaaaaccaaaaagacctagactgttccctgttacagagggcgacgaccagtccccgcagcaaggcgacgactggtgttcagaggaagaaaagtcgccgcagtttaccgaagagacgacgcagacgctacagctccagctccagcgccagctccggcgacagcagcgactcggagagcagctccaactcctacaacaccacctcctcaaaacgcaagcgggcctccaaataaacccattattattggtccggcagtaa

SEQ ID NO: 139 - DNA, 465 bp, Torque teno virus
atgcacttttctcgaataagcagaaagaaagggaaagtgctactgctttgcgtgccagcagttaagaaaaaaccaactgctatgagcttctggagacctccgatgcacaatgtcacggggatccaacgcctgtggtacgagtcctttcaccgtggccatgctgctttttgtggttgtggggatcctgtacttcacattactgcacttgctgagacatatggccatccaacaggcccgagaccttctgggtcatcgggaatagatcccactccgcccatccgtagagccaggcctgccccggccgctccggaacccccacaggttgactccagaccggccctgccatggcatggagatggtggaagcgacggaggcgctggtggctccgcaagcggtggacccgtggcagacttcgcagacgatggcctagaccagctcgtcgccgccctagacgacgaagagtaa

SEQ ID NO: 140 - DNA, 2181 bp, Torque teno virus
atggcatggagatggtggaagcgacggaggcgctggtggctccgcaagcggtggacccgtggcagacttcgcagacgatggcctagaccagctcgtcgccgccctagacgacgaagagtaaggagacgcagacggtggaggagggggcgacccagacgcaggctgtaccgacgctacagacgcaaaaaacgtaggagacgaaagcccaaaataatcttaaaacaatggcagccagacattgtaaagaggtgctacatagtgggctacattcctgccataatatgtggggcgggcacctggtctcacaactacaccagccacctcctagacattatccccaaaggaccctttggaggagggcacagcactatgaggttctccctaaaagtactctttgaagaacacctcagacacttaaacttttggacaaaaagcaaccaggacctagaactcataagatactttagatgctcctttaaattctatagagaccaagacacagactacatagtacactacagcagaaaaactcccctgggaggaaacagactaacagcgcctagcctacaccccggtgtacagatgcttagcaaaaacaaaatattagtacctagctatgctacaaaacccaagggtgggagctatgtaaaagtaaccatagcaccccccacactactaactgacaagtggtactttagcaaagacatttgtgacacaaccttggttaacttagacgttgtactctgcaacttgcggtttccgttctgctcaccacaaactgacaacccttgcatcacattccaagttctgcattccttgtacaacgacttcctctccatagtagatactgaaaattacaaaaccacttttgttactacactgacaacaaaattaggtacaacatggggttcaagactaaatacatttagaacagaaggctgctactcacaccctaaactacctaaaaaacaactaattgctgcaaatgacacaacatactttacatcacctgatgggctctggggagacgcagttttcgacatctcaaaacctcaagtaattaccgaaaatatggagtcttacgctaactcagccaaacaaagaggggtgaacggagaccccgctttttgccacctaacaggaatatactcacctccctggctaacaccaggcagaatatcccctgaaaccccaggactttacacagacgtgacttacaacccatacgctgacaaaggagtaggcaacagaatatgggtcgactactgcagtaaaaaaggcaacaaatatgacaatacaagtaaatgccttttagaagacatgccactatggatggtatgctttggatacgtagactgggtaaaaaaagagactggcaactggggtattccactatgggctagagtacttatcagaagcccatacgctgttccaaaactgtataatgaagcagacccaaactatggatgggtacctatttcttactactttggagaaggcaaaatgccaaacggagacatgtacgtaccatttaaaataagaatgaaatggtacccttcaatgtggaaccaagagccagtgttaaatgacttagcaaagagcggaccgtttgcatacaaaaacacaaaaacaagcgtgactgtgactgccaaatataaatttacatttaacttcgggggcaaccccgtaccctcacagattgtacaagatccctgcacacagtccacctacgacatccccggcaccggtaacctgcctcgcagaacacaagtcattgacccgaaattcctcggtccccactattccttccaccggtgggacttcaggcgtggcctctttggctcacaagctattaagagagtgtcagaacaaccaacaacttctgagtttttattctcaggcccaaagagacccagaatcgatcaaggtccttacatcccgccagaaaaagactcaggttcactccaaagagaatcgagaccgtggagcagctcggagaccgaggcagagacagaagccccctcggaagaagagccggagaaccaagaagaacaagtactccagttgcagctcagacagcagcttcgagaacagcgaaaactcagacagggaatccagtgcctattcgagcaactgataacaacccaacagggggtccacaaaaacccattgttagagtag

SEQ ID NO: 141 - DNA, 465 bp, Torque teno virus
atgcacttttctcgaataagcagaaagaaaaggaaagtgctactgctttgcgtgccagcagttaagaaaaaaccaactgctatgagcttctggagacctccgatgcacaatgtcacggggatccaacgcctgtggtacgagtcccttcaccgtggccatgctgctttttgtggttgtggggatcctgtacttcacattactgcacttgctgagacatatggccatccaacaggcccgagaccttctgggtcatcgggaatagatcccactccgcccatccgtagagccaggcctgccccggccgctccggaacccccacaggttgactccagaccggccctgccatggcatggagatggtgggagcgacggaggcgctggtggctccgcaagcggtggacccgtggcagacttcgcagacgatggcctagaccagctcgtcgccgccctagacgacgaagagtaa

SEQ ID NO: 142 - DNA, 2181 bp, Torque teno virus
  modified_base (1380)..(1380): a, c, t, g, unknown or other
atggcatggagatggtgggagcgacggaggcgctggtggctccgcaagcggtggacccgtggcagacttcgcagacgatggcctagaccagctcgtcgccgccctagacgacgaagagtaaggagacgcagacggtggaggagggggcgacccagacgcagactgtaccgacgctacagacgcaaaaaacgtaggagacgaaagcccaaaataatcttaaaacaatggcagccagacattgtaaagaggtgctacatagtgggctacattcctgccataatatgtggggcgggcacctggtctcacaactacaccagccacctcctagacattatccccaaaggaccctttggaggagggcacagcactatgaggttctccctaaaagtactctttgaagaacacctcagacacttaaacttttggacaaaaagcaaccaggacctagaactcataagatactttagatgctcctttaaattctatagagaccaagacacagactacatagtacactacagcagaaaaactcccctgggaggaaacagactaacagcgcctagcctacaccccggtgtacagatgcttagcaaaaacaaaatattagtacctagctatgctacaaaacccaagggtgggagctatgtaaaagtaaccatagcaccccccacactactaactgacaagtggtactttagcaaagacatttgtgacacaaccttggttaacttagacgttgtactctgcaacttgcggtttccgttctgctcaccacaaactgacaacccttgcatcacattccaagttctgcattccttgtacaacgacttcctctctatagtagatactgaaaattacaaaaccacttttgttactacactgacaacaaaattaggtacaacatggggttcaagactaaatacatttagaacagaaggctgctactcacaccctaaactacctaaaaaacaactaattgctgcaaatgacacaacatactttacatcacctgatgggctctggggagacgcagttttcgacatctcaaaacctcaagtaattaccgaaaatatggagtcttacgctaactcagccaaacaaagaggggtgaacggagaccccgctttttgccacctaacaggaatatactcacctccctggctaacaccaggcagaatatcccctgaaaccccaggactttacacagacgtgacttacaacccatacgctgacaaaggagtaggcaacagaatatgggtcgactactgcagtaaaaaaggcaacaaatatgacaatacaagtaaatgccttttagaagacatgccactatggatggtatgctttggatacgtagactgggtaaaaaaagagactggcaantggggtattccactatgggctagagtacttatcagaagcccatacactgttccaaaactgtataatgaagcagacccaaactatggatgggtacctatttcttactactttggagaaggcaaaatgccaaacggagacatgtacgtaccatttaaaatgagaatgaaatggcacccttcaatgtggaaccaagagccagtgttaaatgacttagcaaagagcggaccgtttgcatacaaaaacacaaaaacaagcgtgactgtgactgccaaatataaatttacatttaacttcgggggcaaccccgtaccctcacagattgtacaaggtccctgcacacagtccacctacgacatccccggcaccggtaacctgcctcgcagaatacaggtcattgacccgaaattcctcggtccccactattccttccaccggtgggacttcaggcgtggcctctttggctcacaagctattaagagagtgtcagaacaaccaacaacttctgagtttttattctcaggcccaaagagacccagaatcgatcaaggtccttacatcccgccagaaaaagactcaggttcactccaaagagaatcgagaccgtggagcagctcggagaccgaggcagagacagaagccccctcggaagaagagccggagaaccaagaagaacaagtactccagttgcagctcagacagcagcttcgagaacagcgaaaactcagacagggaatccagtgcctattcgagcaactgataacaacccaacagggggtccacaaaaacccattgttagagtag

SEQ ID NO: 143 - DNA, 465 bp, Torque teno virus
atgcacttttctcgaataagcagaaagaaaaggaaagtgctactgctttgcgtgccagcagttaagaaaaaaccaactgctatgagcttctggagacctccgatgcacaatgtcacggggatccaacgcctgtggtacgagtcccttcaccgtggccatgctgctttttgtggttgtggggatcctgtacttcacattaccgcacttgctgagacatatggccatccaacaggcccgagaccttctgggtcatcgggaatagatcccactccgcccatccgtagagccaggcctgccccggccgctccggaacccccacaggttgactccagaccggccctgccatggcatggagatggtggaagcgacggaggcgctggtggctccgcaagcggtggacccgtggcagacttcgcagacgatggcctagaccagctcgtcgccgccctagacgacgaagagtaa

SEQ ID NO: 144 - DNA, 2181 bp, Torque teno virus
atggcatggagatggtggaagcgacggaggcgctggtggctccgcaagcggtggacccgtggcagacttcgcagacgatggcctagaccagctcgtcgccgccctagacgacgaagagtaaggagacgcagacggtggaggagggggcgacccagacgcagactgtaccgacgctacagacgcaaaaaacgtaggagacgaaagcccaaaataatcttaaaacaatggcagccagacattgtaaagaggtgctacatagtgggctacattcctgccataatatgtggggcgggcacctggtctcacaactacaccagccacctcctagacattatccccaaaggactctttggaggagggcacagcactatgaggttctccctaaaagtactctttgaagaacacctcagacacttaaacttttggacaaaaagcaaccaggacctagaactcataagatactttagatgctcctttaaattctatagagaccaagacacagactacatagtacactacagcagaaaaactcccctgggaggaaacagactaacagcgcctagcctacaccccggtgtacagttgcttagcaaaaacaaaatattagtacctagctatgctacaaaacccaagggtgggagctatgtaaaagtaaccatagcaccccccacactactaactgacaagtggtactttagcaaagacatttgtgacacaaccttggttaacttagacgttgtactctgcaacttgcggtttccgttctgctcaccacaaactgacaacccttgcatcacattccaagttctgcattccttgtacaacgacttcctctctatagtagatactgaaaattacaaaaccacttttgttactacactgacaacaaaattaggtacaacatggggttcaagactaaatacatttagaacagaaggctgctactcacaccctaaactacctaaaaaacaactaattgctgcaaatgacacaacatactttacatcacctgatgggctctggggagacgcagttttcaacatctcaaaacctcaagtaattaccgaaaatatggagtcttacgctaactcagccaaacaaagaggggtgaacggagaccccgctttttgccacctaacaggaatatactcacctccctggctaacaccaggcagaatatcccctgaaaccccaggactttacacagacgtgacttacaacccatacgctgacaaaggagtaggcaacagaatatgggtcgactactgcagtaaaaaaggcaacaaatatgacaatacaagtaaatgccttttagaagacatgccactatggatggtatgctttggatacgtagactgggtaaaaaaagagactggcaactggggtattccactatgggctagagtacttatcagaagcccatacactgttccaaaactgtataatgaagcagacccaaactatggatgggtacctatttcttactactttggagaaggcaaaatgccaaacggagacatgtacgtaccatttaaaataagaatgaaatggcacccttcaatgtggaaccaagagccagtgttaaatgacttagcaaagagcggaccgtttgcatacaaaaacacaaaaacaagcgtgactgtgactgccaaatataaatttacatttaacttcgggggcaaccccgtaccctcacagattgtacaagatccctgcacacagtccacctacgacatccccggcaccggtaacctgcctcgcagaatacaagtcattgacccgaaattcctcggtccccactattccttccaccggtgggacttcaggcgtggcctctttggctcacaagctattaagagagtgtcagaacaaccaacaacttctgagtttttattctcaggcccaaagagacccagaatcgatcaaggtccttacatcccgccagaaaaagactcaggttcactccaaagagaatcgagaccgtggagcagctcggagaccgaggcagagacagaagccccctcggaagaagagccggagaaccaagaagaacaagtactccagttgcagctcagacagcagcttcgagaacagcgaaaactcagacagggaatccagtgcctattcgagcaactgataacaacccaacagggggtccacaaaaacccattgttagagtag

SEQ ID NO: 145 - DNA, 465 bp, Torque teno virus
atgcacttttctcgaataagcagaaagaaaaggaaagtgctactgctttgcgtgccagcagctaagaaaaaaccaactgctatgagcttctggaaacctccggtacacaatgtcacggggatccaacgcatgtggtatgagtcctttcaccgtggccacgcttctttttgtggttgtgggaatcctatacttcacattactgcacttgctgaaacatatggccatccaacaggcccgagaccttctgggccaccgggagtagaccccaacccccacatccgtagagccaggcctgccccggccgctccggggccctcacaggttgattcgagaccagccctgacatggcatggggatggtggaagcgacggaggcgctggtggttccggaagcggtggacccgtggcagacttcgcagacgatggcctcgatcagctcgtcgccgccctagacgacgaagagtaa

SEQ ID NO: 146 - DNA, 426 bp, Torque teno virus
atggcatggggatggtggaagcgacggaggcgctggtggttccggaagcggtggacccgtggcagacttcgcagacgatggcctcgatcagctcgtcgccgccctagacgacgaagagtaaggaggcgcagacggtggaggagggggagacgaaaaacagggacttacagacgcaggagacgctttagacgcaggagacgaaaagcaaaacttataataaaactgtggcaacctgcagtaattaaaagatgcagaataaagggatacataccactgattataagtgggaacggtacctttgccacaaactttaccagtcacataaatgacagaataatgaaaggccccttcgggggaggacacagcactatgaggttcagcctctacattttgtttgaggagcacctcagacacatgaacttctag

SEQ ID NO: 147 - DNA, 1500 bp, Torque teno virus
atggcagttgaggctgacttgcggtttccgttctgctcaccacaaactgacaacacttgcatcagcttccaggtccttagttccgtttacaacaactacctcagtattaatacctttaataatgacaactcagactcaaagttaaaagaatttttaaataaagcatttccgacaacaggcacaaaaggaacaagtttaaatgcactaaatacatttagaacagaaggatgcataagtcacccacaactaaaaaaaccaaacccacaaataaacaaaccattagagtcacaatactttgcacctttagatgccctctggggagaccccatatactataatgatctaaatgaaaacaaaagtttgaacgatatcattgagaaaatactaataaaaaacatgattacataccatgcaaaactaagagaatttccaaattcataccaaggaaacaaggccttttgccacctaacaggcatatacagcccaccatacctaaaccaaggcagaatatctccagaaatatttggactgtacacagaaataatttacaacccttacacagacaaaggaactggaaacaaagtatggatggacccactaactaaagagaacaacatatataaagaaggacagagcaaatgcctactgactgacatgcccctatggactttactttttggatatacagactggtgtaaaaaggacactaataactgggacttaccactaaactacagactagtactaatatgcccttatacctttccaaaattgtacaatgaaaaggtaaaagactatgggtacatcccgtactcctacaaattcggagcgggtcagatgccagacggcagcaactacataccctttcagtttagagcaaagtggtaccccacagtactacaccagcaacaggtaatggaggacataagcaggagcgggccctttgcacctaaggtagaaaaaccaagcactcagctggtaatgaagtactgttttaactttaactggggcggtaaccctatcattgaacagattgttaaagaccccagcttccagcccacctatgaaatacccggtaccggtaacatccctagaagaatacaagtcatcgacccgcgggtcctgggaccgcactactcgttccggtcatgggacatgcgcagacacacatttagcagagcaagtattaagagagtgtcagaacaacaagaaacttctgaccttgtattctcaggcccaaaaaagcctcgggtcgacatcccaaaacaagaaacccaagaagaaagctcacattcactccaaagagaatcgagaccgtgggagaccgaggaagaaagcgagacagaagccctctcgcaagagagccaagaggtccccttccaacagcagttgcagcagcagtaccaagagcagctcaagctcagacagggaatcaaagtcctcttcgagcagctcataaggacccaacaaggggtccatgtaaacccatgcctacagtag

SEQ ID NO: 148 - DNA, 465 bp, Torque teno virus
atgcacttttctcgaataagcagaaagaaaaggaaagtgctactgctttgcgtgccagcagctaagaaaaaaccaactgctatgagcttctggaaacctccggtacacaatgtcacggggatccaacgcatgtggtatgagtcctttcaccgtggccacgcttctttttgtggttgtgggaatcctatacttcacattactgcacttgctgaaacatatggccatccaacaggcccgagaccttctgggccaccgggagtagaccccaacccccacatccgtagagccaggcctgccccggccgctccggagccctcacaggttgattcgagaccagccctgacatggcatggggatggtggaagcgacggaggcgctggtggttccggaagcggtggacccgtggcagacttcgcagacgatggcctcgatcagctcgtcgccgccctagacgacgaagagtaa

SEQ ID NO: 149 - DNA, 2232 bp, Torque teno virus
atggcatggggatggtggaagcgacggaggcgctggtggttccggaagcggtggacccgtggcagacttcgcagacgatggcctcgatcagctcgtcgccgccctagacgacgaagagtaaggaggcgcagacggtggaggagggggagacgaaaaacaaggacttacagacgcaggagacgctttagacgcaggggacgaaaagcaaaacttataataaaactgtggcaacctgcagtaattaaaagatgcagaataaagggatacataccactgattataagtgggaacggtacctttgccacaaactttaccagtcacataaatgacagaataatgaaaggccccttcgggggaggacacagcactatgaggttcagcctctacattttgtttgaggagcacctcagacacatgaacttctggaccagaagcaacgataacctagagctaaccagatacttgggggcttcagtaaaaatatacaggcacccagaccaagactttatagtaatatacaacagaagaacccctctaggaggcaacatctacacagcaccctctctacacccaggcaatgccattttagcaaaacacaaaatattagtaccaagtttacagacaagaccaaagggtagaaaagcaattagactaagaatagcaccccccacactctttacagacaagtggtactttcaaaaggacatagccgacctcacccttttcaacatcatggcagttgaggctgacttgcggtttccgttctgctcaccacaaactgacaacacttgcatcagcttccaggtccttagttccgtttacaacaactacctcagtattaatacctttaataatgacaactcagactcaaagttaaaagaatttttaaataaagcatttccaacaacaggcacaaaaggaacaagtttaaatgcactaaatacatttagaacagaaggatgcataagtcacccacaactaaaaaaaccaaacccacaaataaacaaaccattagagtcacaatactttgcacctttagatgccctctggggagaccccatatactataatgatctaaatgaaaacaaaagtttgaacgatatcattgagaaaatactaataaaaaacatgattacataccatgcaaaactaagagaatttccaaattcataccaaggaaacaaggccttttgccacctaacaggcatatacagcccaccatacctaaaccaaggcagaatatctccagaaatatttggactgtacacagaaataatttacaacccttacacagacaaaggaactggaaacaaagtatggatggacccactaactaaagagaacaacatatataaagaaggacagagcaaatgcctactgactgacatgcccctatggactttactttttggatatacagactggtgtaaaaaggacactaataactgggacttaccactaaactacagactagtactaatatgcccttatacctttccaaaattgtacaatgaaaaagtaaaagactatgggtacatcccgtactcctacaaattcggagcgggtcagatgccagacggcagcaactacataccctttcagtttagagcaaagtggtaccccacagtactacaccagcaacaggtaatggaggacataagcaggagcgggccctttgcacctaaggtagaaaaaccaagcactcagctggtaatgaagtactgttttaactttaactggggcggtaaccctatcattgaacagattgttaaagaccccagcttccagcccacctatgaaatacccggtaccggtaacatccctagaagaatacaagtcatcgacccgcgggtcctgggaccgcactactcgttccggtcatgggacatgcgcagacacacatttagcagagcaagtattaagagagtgtcagaacaacaagaaacttctgaccttgtattctcaggcccaaaaaagcctcgggtcgacatcccaaaacaagaaacccaagaagaaagctcacattcactccaaagagaatcgagaccgtgggagaccgaggaagaaagcgagacagaagccctctcgcaagagagccaagaggtccccttccaacagcagttgcagcagcagtaccaagagcagctcaagctcagacagggaatcaaagtcctcttcgagcagctcataaggacccaacaaggggtccatgtaaacccatgcctacggtag

SEQ ID NO: 150 - DNA, 465 bp, Torque teno virus
atgcacttttctcgaataagcagaaagaaaaggaaagtgctactgctttgcgtgccagcagctaagaaaaaaccaactgctatgagcttctggaaacctccggtacacaatgtcacggggatccaacgcatgtggtatgagtcctttcaccgtggccacgcttctttttgtggttgtgggaatcctatacttcacattactgcacttgctgaaacatatggccatccaacaggcccgagaccttctgggccaccgggagtagaccccaacccccacatccgtagagccaggcctgccccggccgctccggagccctcacaggttgattcgagaccagccctgacgtggcatggggatggtggaagcgacggaggcgctggtggttccggaagcggtggacccgtggcagacttcgcagacgatggcctcgatcagctcgtcgccgccctagacgacgaagagtaa

SEQ ID NO: 151 - DNA, 1896 bp, Torque teno virus
atgaaaggccccttcgggggaggacacagcactatgaggttcagcctctacattttgtttgaggagcgcctcagacacatgaacttctggaccagaagcaacgataacctagagctaaccagatacttgggggcttcagtaaaaatatacaggcacccagaccaagactttatagtaatatacaacagaagaacccctctaggaggcaacatctacacagcaccctctctacacccaggcaatgccattttagcaaaacacaaaatattagtaccaagtttacagacaagaccaaagggtagaaaagcaattagactaagaatagcaccccccacactctttacagacaagtggtactttcaaaaggacatagccgacctcacccttttcaacatcatggcagttgaggctgacttgcggtttccgttctgctcaccacaaactggcaacacttgcatcagcttccaggtccttaattccgtttacaacaactacctcagtattaatacctttaataatgacaactcagactcaaagttaaaagaatttttaaataaagcatttccaacaacaggcacaaaaggaacaagtttaaatgcactaaatacatttagaacagaaggatgcataagtcacccacaactaaaaaaaccaaacccacaaataaacaaaccattagattcacaatactttgcacctttagacgccctctggggagaccccatatactataatgatctaaatgaaaagaaaagtttgaaggatatcattgagaacatactaataaaaaacatgattacataccatgaaaaactaagagagtttccaaattcataccaaggaaacaaggccttttgccacctaacaggcatatacagcccaccatacctaaaccaaggcagaatatctccagaaatatttggactgtacacagaaataatttacaacccttacacagacaaaggaactggaaacaaagtatggatggacccactaactaaagagaacaacatatataaagaaggacagagcaaatgcctactgactgacatgcccctatggactttactttttggatatacagactggtgtaaaaaggacactaataactgggacttaccactaaactacagactagtactaatatgcccttatacctttccaaaattgtacaatgaaaaggtaaaagactatgggtacatcccgtactcctacaaattcggagcgggtcagatgccagacggcagcaactacataccctttcagtttagagcaaagtggtaccccacagtactacaccagcaacaggtaatggaggacataagcaggagcgggccctttgcacctaaggtagaaaaaccaggcactcagctggtaatgaagtactgttttaactttaactggggcggtaaccctatcattgaacagattgttaaagaccccagcttccagcccacctatgaaatacccggtaccggtgacatccctagaagaatacaagtcatcgacccgcgggtcctgggaccgcactactcgttccggtcatgggacacgcgcagacacacatttagcagagcaagtattaagagagtgtcagaacaacaagaagcttctgaccttgtattctcaggcccaaaaaagcctcgggtcgacatcccaaaacaagaaacccaagaagaaagctcacattcactccaaagagaatcgagaccgtgggagaccgaggaagaaagcgagacagaagccctctcgcaagagagccaagaggtccccttccaacagcagttgcagcagcagtaccaagagcagctcaagctcagacagggaatcaaagtcctcttcgagcagctcataaggacccaacaaggggtccatgtaaacccatgcctacagtag

SEQ ID NO: 152 - DNA, 465 bp, Torque teno virus
atgcacttttctcgaataagcagaaagaaaaggaaagtgctactgctttgcgtgccagcagctaagaaaaaaccaactgctatgagcttctggaaacctccggtacacaatgtcacggggatccaacgcatgtggtatgagtcctttcaccgtggccacgcttctttttgtggttgtgggaatcctatacttcacattactgcacttgctgaaacatatggccgtccaacaggcccgagaccttctgggccaccgggagtagaccccaacccccacatccgtagagccaggcctgccccggccgctccggagccctcacaggttgattcgagaccagccctgacatggcatggggatggtggaagcgacggaggcgctggtggttccggaagcggtggacccgtggcagacttcgcagacgatggcctcgatcagctcgtcgccgccctagacgacgaagagtaa

SEQ ID NO: 153 - DNA, 2232 bp, Torque teno virus
atggcatggggatggtggaagcgacggaggcgctggtggttccggaagcggtggacccgtggcagacttcgcagacgatggcctcgatcagctcgtcgccgccctagacgacgaagagtaagggggcgcagacggtggaggagggggagacgaaaaacaaggacttacagacgcaggagacgctttagacgcaggagacgaaaagcaaaacttatagtaaaactgtggcaacctgcagtaattaaaagatgcagaataaagggatacataccactgattataggtgggaacggtacctttgccacaaactttaccagtcacataaatgacagaataatgaaaggccccttcgggggaggacacagcactatgaggttcagcctctacattttgtttgaggagcacctcagacacatgaacttctggaccagaagcaacgataacctagagctaaccagatacttgggggcttcagtaaaaatatacaggcacccagaccaagactttatagtaatatacaacagaagaacccctctaggaggcaacatctacacagcaccctctctacacccaggcaatgccattttagcaaaacacaaaatattagtaccaagtttacagacaagaccaaagggtagaaaagcaattagactaagaatagcaccccccacactctttacagacaagtggtactttcaaaaggacatagccgacctcacccttttcaacatcatggcagttgaggctgacttgcggtttccgttctgctcaccacaaactgacaacacttgcatcagcttccaggtccttagttccgtttacaacaactacctcagtattaatacctttaataatgacaactcagactcaaagttaaaagaatttttaaataaagcatttccaacaacaggcacaaaaggaacaagtttaaatgcactaaatacatttagaacagaaggatgcataagtcacccacaactaaaaaaaccaaacccacaaataaacaaaccattagagtcacaatactttgcacctttagatgccctctggggagaccccatatactataatgatctaaatgaaaacaaaagtttgaacgatatcattgagaaaatactaataaaaaacatgattacataccatgcaaaactaagagaatttccaaattcataccaaggaaacaaggccttttgccacctaacaggcatatacagcccaccatacctaaaccaaggcagaatatctccagaaatatttggactgtacacagaaataatttacaacccttacacagacaaaggaactggaaacaaagtatggatggacccactaactaaagagaacaacatatataaagaaggacagagcaaatgcctactgactgacatgcccctatggactttactttttggatatacagactggtgtaaaaaggacactaataactgggacttaccactaaactacagactagtactaatatgcccttatacctttccaaaattgtacaatgaaaaggtaaaagactatgggtacatcccgtactcctacaaattcggagcgggtcagatgccagacggcagcaactacataccctttcagtttagagcaaagtggtaccccacagtactacaccagcaacaggtaatggaggacataagcaggagcgggccctttgtacctaaggtagaaaaaccaagcactcagctggtaatgaagtactgttttaactttaactggggcggtaaccctatcattgaacagattgttaaagaccccagcttccagcccacctatgaaatacccggtaccggtaacatccctagaagaatacaagtcatcgacccgcgggtcctgggaccgcactactcgttccggccatgggacatgcgcagacacacatttagcagagcaagtattaagagagtgtcagaacaacaagaaacttctgaccttgtattctcaggcccaaaaaagcctcgggtcgacatcccaaaacaagaaacccaagaagaaagctcacattcactccaaagagaatcgagaccgtgggagaccgaggaagaaagcgagacagaagccctctcgcaagagagccaagaggtccccttccaacagcagttgcagcagcagtaccaagaacagctcaagctcagacagggaatcaaagtcctcttcgagcagctcataaggacccaacaaggggtccatgtaaacccatgcctacagtag

SEQ ID NO: 154 - DNA, 465 bp, Torque teno virus
atgcacttttctcgaataagcagaaagaaaaggaaagtgctactgctttgcgtgccagcagctaagaaaaaaccaactgctatgagcttctggaaacctccggtacacaatgtcacggggatccaacgcatgtggtatgggtcctttcaccgtggccacgcttctttttgtggttgtgggaatcctatacttcacattactgcacttgctgaaacatatggccatccaacaggcccgagaccttctgggccaccgggagtagaccccaacccccacatccgtagagccaggcctgccccggccgctccggagccctcacaggttgattcgagaccagccctgacatggcatggggatggtggaagcgacggaggcgctggtggtcccggaagcggtggacccgtggcagacttcgcagacgatggcctcgatcagctcgtcgccgccctagacgacgaagagtaa

SEQ ID NO: 155 - DNA, 228 bp, Torque teno virus
atggcatggggatggtggaagcgacggaggcgctggtggtcccggaagcggtggacccgtggcagacttcgcagacgatggcctcgatcagctcgtcgccgccctagacgacgaagagtaaggaggcgcagacggtggaggagggggagacgaaaaacaaggacttacagacgcaggagacgctttagacgcaggagacgaaaagcaaaacttataataaaactgtga

SEQ ID NO: 156 - DNA, 354 bp, Torque teno virus
atgaaaggccccttcgggggaggacacagcactatgaggttcagcctctacattttgtttgaggagcacctcagacacatgaacttctggaccagaagcaacgataacctagagctaaccagatacttgggggcttcagtaaaaatatacaggcacccagaccaagactttatagtaatatacaacagaagaacccctctaggaggcaacatctacacagcaccctctctacacccaggcaatgccattttagcaaaacacaaaatattagtaccaagtttacagacaagaccaaagggtagaaaagcaattagactaagaatagcaccccccacactctttacagacaagtag

SEQ ID NO: 157 - DNA, 1500 bp, Torque teno virus
atggcagttgaggctgacttgcggtttccgttctgctcaccacaaactgacaacacttgcatcagcttccaggtccttagttccgtttacaacaactacctcagtattaatacctttaataatgacaactcagactcaaagttaaaagaatttttaaataaagcatttccaacaacaggcacaaaaggaacaagtttaaatgcactaaatacatttagaacagaaggatgcataagtcacccacaactaaaaaaaccaaacccacaaacaaacaaaccatcagagtcacaatactttgcacctttagatgccctctggggagaccccatatactataatgatctaaatgaaaagaaaagtttcaagaatatcattgagaacatactaataaaaaacatgattacataccatgaaaaactaacagaatttccaaattcataccaaggaaacaaggccttttgccacctaacaggcatatacagcccaccatacctaaaccaaggcagaatatctccagaaatatttggactgtacacagaaataatttacaacccttacacagacaaaggaactggaaacaaagtatggatggacccactaactaaagagaacaacatatataaagaaggacagagcaaatgcctactgactgacatgcccctatggactttactttttggatatacagactggtgtaaaaaggacactaataactgggacttaccactaaactacagactagtactaatatgcccttatacctttccaaaattgtacaatgaaaaggtaaaagactatgggtacatcccgtactcctacaaattcggagcgggtcagatgccagacggcagcaactacataccctttcagtttagagcaaagtggtaccccacagtactacaccagcaacaggtaatggaggacataagcaggagcgggccctttgcacctaaggtagaaaaaccaagcactcagctggtaatgaagtactgttttaactttaactggggcggtaaccctatcattgaacagattgttaaagaccccagcttccagcccacctatgaaatacccggtaccggtaacatccctagaagaatacaagtcatcgacccgcgggtcctgggaccgcactactcgttccggtcatgggacatgcgcagacacacatttagcagagcaagtattaagagagtgtcagaacaacaagaaacttctgaccttgtattctcaggcccaaaaaagcctcgggtcgacatcccaaaacaagaaacccaagaagaaagctcacattcactccaaagagaatcgagaccgtgggagaccgaggaagaaagcgagacagaagccctctcgcaagagagccaagaggtccccttccaacagcagttgcagcagcagtaccaagagcagctcaagctcagacagggaatcaaagtcctcttcgagcagctcataaggacccaacaaggggtccatgtaaacccatgcctacagtag

SEQ ID NO: 158 - DNA, 465 bp, Torque teno virus
atgcacttttctcgaataagcagaaagaaaaggaaagtgctactgctttgcgtgccagcagctaagaaaaaaccaactgctatgagcttctggaaacctccggtacacaatgtcacggggatccaacgcatgtggtatgagtcctttcaccgtggccacgcttctttttgtgattgtgggaatcctatacttcacattactgcacttgctgaaacatatggccatccaacaggcccgagaccttctgggccaccgggagtagaccccaacccccacatccgtagagccaggcctgccccggccgctccggagccctcacaggttgattcgagaccagccctgacatggcatggggatggtggaagcgacagaggcgctggtggttccggaagcggtggacccgtggcagacttcgcagacgatggcctcgatcagctcgttgccgccctagacgacgaagagtaa

SEQ ID NO: 159 - DNA, 2232 bp, Torque teno virus
atggcatggggatggtggaagcgacagaggcgctggtggttccggaagcggtggacccgtggcagacttcgcagacgatggcctcgatcagctcgttgccgccctagacgacgaagagtaaggaggcgcagacggtggaggagggggagacgaaaaacaaggacttacagacgcaggagacgctttagacgcaggagacgaaaagcaaaacttataataaaactgtggcaacctgcagtaattaaaagatgcagaataaagggatacataccactgattataagtgggaacggtacctttgccacaaactttaccagtcacataaatgacagaataatgaagggccccttcgggggaggacacagcactatgaggttcagtctctacattttgtttgaggagcacctcagacacatgaacttctggaccagaagcaacgataacctagagctaaccagatacttgggggcttcagtaaaaatatacaggcacccagaccaagactttatagtaatatacaacagaagaacccctctaggaggcaacatctacacagcaccctctctacacccaggcaatgccattttagcaaaacacaaaatattagtaccaagtttacagacaagaccaaagggtagaaaagcaattagactaagaatagcaccccccacactctttacagacaagtggtactttcaaaaggacatagccgacctcacccttttcaacatcatggcagttgaggctgacttgcggtttccgttctgctcaccacaaactgacaacacttgcatcagcttccaggtccttagttccgtttacaacaactacctcagtattaatacctttaataatgacaactcagactcaaagttaaaagaatttttaaataaagcatttccaacaacaggcacaaaaggaacaagtttaaatgcactaaatacatttagaacagaaggatgcataagtcacccacaactaaaaaaaccaaacccacaaataaacaaaccattagagtcacaatactttgcacctttagatgccctctggggagaccccatatactataatgatctaaatgaaaacaaaagtttgaacgatatcattgagaaaatactaataaaaaacatgattacataccatgcaaaactaagagaatttccaaattcataccaaggaaacaaggccttttgccacctaacaggcatatacagcccaccatacctaaaccaaggcagaatatctccagaaatatttggactgtacacagaaataatttacaacccttacacagacaaaggaactggaaacaaagtatggatggacccactaactaaagagaacaacatatataaagaaggacagagcaaatgcctactgactgacatgcccctatggactttactttttggatatacagactggtgtaaaaaggacactaataactgggacttaccactaaactacagactagtactaatatgcccttatacctttccaaaattgtacaatgaaaaggtaaaagactatgggtacatcccgtactcctacaaattcggagcgggtcagatgccagacggcagcaactacataccctttcagtttagagcaaagtggtaccccacagtactacaccagcaacaggtaatggaggacataagcaggagcgggccctttgcacctaaggtagaaaaaccaagcactcagctggtaatgaagtactgttttaactttaactggggcggtaaccctatcattgaacagattgttaaagaccccagcttccagcccacctatgaaatacccggtaccggtaacatccctagaagaatacaagtcatcgacccgcgggtcctgggaccgcactactcgttccggtcatgggacatgcgcagacacacatttagcagagcaagtattaagagagtgtcagaacaacaagaaacttctgaccttgtattctcaggcccaaaaaagcctcgggtcgacatcccaaaacaagaaacccaagaagaaagctcacattcactccaaagagaatcgagaccgtgggagaccgaggaagaaagcgagacagaagccctctcgcaagagagccaagaggtccccttccaacagcagttgcagcagcagtaccaagagcagctcaagctcagacagggaatcaaagtcctcttcgagcagctcataaggacccaacaaggggtccatgtaaacccatgcctacagtag

SEQ ID NO: 160 - DNA, 2313 bp, Torque teno virus
atggcctatggctggtggcgccgaaggagaagacggtggcgcaggtggagacccagaccatggaggccccgctggaggacccgaagacgcagacctgctagacgccgtggccaccgcagaaacgtaagaagacgccgcagaggagggaggtggaggaggagatataggagatggaaaagaaagggcaggcgcagaaaaaaagctaaaataataataagacaatggcaaccaaactacagaaggagatgtaacatagtaggctacatccctgtactaatatgtggcgaaaatactgtcagcagaaactatgccacacactcagacgataccaactacccaggaccctttggggggggtatgactacagacaaatttactttaagaattctgtatgacgagtacaaaaggtttatgaactactggacagcatctaacgaagacctagacctttgtagatatctaggagtaaacctgtactttttcagacacccagatgtagattttatcataaaaattaataccatgcctccttttctagacacagaactcacagcccctagactacacccaggcatgctagccctagacaaaagagcaagatggatacctagcttaaaatctataccaggaaaaaaacactatattaaaataagagtaggggcaccaaaaatgttcactgataaatggtacccccaaacagatctttgtgacatggtgcttctaactgtctatgcaaccgcagcggatataccatatccgttcggctcaccactaactgactctgtggttgtgaacttccaggttctgcaatccatgtatgataaatacattagcatattaccagaccaaaagtcacaaagtaagtcactacttagtaacatagcaaattacattcccttttataataccacacaaactatagcccaattaaagccatttatagatgcaggcaatataacatcaggcacagcagcaacaacatggggatcatacataaacacaaccaaatttactacaacagccacaacaacttatacatatccaggcactacaactaacacagttactatgtattcctctaatgactcctggtacagaggaacagtatataacaatcaaattaaagagttaccaaaaaaagcagctgaattatactcaaaagcaacaaaaaccttgctaggaaacaccttcacaactgaagactgcacactagaataccatggaggactatacagctcaatatggctatcccctggtagatcttactttgaaacaccaggagcatacacagacataaagtacaatccattcacagacagaggagaaggcaacatgttatggatagactggctaagcaaaaaaaacatgaactatgacaaagtacaaagtaaatgcttagtatcagacctacctctatgggcatcagcatatggatatgtagaattttgtgcaaaaagtacaggagaccagaacatacacatgaatgccaggctactaataagaagtccctttacagacccacagctactagtacacacagaccccacaaaaggctttgttccctactctttaaactttggaaatggtaaaatgccaggaggtagtagtaatgtgcctattagaatgagagctaaatggtatccaacattgtttcaccaacaagaagtactagaggccttagcacagtcaggcccctttgcataccactcagacattaaagaagtatctctgggtatgaaataccgttttaagtggatctggggtggaaaccccgttcgccaacaggttgttagaaatccctgcaaagaaacccactcctcgggcaatagagtccctagaagcttacaaatcgttgacccgaaatacaactcaccggaactcacattccatacctgggacttcagacgtggcctctttggcccgaaagctattcagagaatgcaacaacaaccaacaactactgacattttttcagcaggccgcaagagacccaggagggacaccgaggtgtaccactccagccaagaaggggagcaaaaagaaagcttacttttccccccagtcaagctcctcagacgagtccccccgtgggaagactcgcagcaggaggaaagcgggtcgcaaagctcagaggaagagacgcagaccgtctcccagcagctcaagcagcagctgcagcaacagcaaatcctgggagtcaaactcagactcctgttcgaccaagtccaaaaaatccaacaaaatcaagatatcaaccctaccttgttaccaagggggggggatctagcatcgttatttcaaatagcaccataa

SEQ ID NO: 161 - DNA, 2313 bp, Torque teno virus
atggcctatgggttgtggaggagacggcgaaggaggtggaagaggtggagacgcagacggtggagacgccgctggaggacccgccgacgcagacctgctggacgccgtagacgccgcagaacagtaaggagacggcgcaggcgcgggaggtggaggaggagatataggagatggaggcgaaaaggcagacgcaggaaaaagaaaaaactcataataagacaatggcagccaaactataccagaaagtgcaacattgtgggttatatgccagttataatgtgtggcgaaaatactgtcagcagaaactatgccacacactcagacgataccaactacccaggaccctttggggggggtatgactacagacaaatttactttaagaattctgtatgactggtacaaaaggtttatgaactactggacagcatctaacgaagacctagacctttgtagatatctaggagtgaacctgtactttttcagacacccagatgtagattttatcataaaaattaataccatgcctccttttctagacacagaactcacagcccctagcatacacccaggcatgctagccctagacgaaagagcaagatggatacctagcttaaaatctagaccaggaaaaaaacactatattaaaataagagtaggggcaccaaaaatgttcactgataaatggtacccccaaacagatctttgtgacatggtgcttctaactgtctatgcaaccgcagcggatatgcaatatccgttcggctacccactaactgactctgtggttgtgaacttccaggttctgcaatccatgtatgataaatacattagcatattaccagaccaaaagtcacaaagagagtcactacttagtaacatagcaaattacattcccttttataataccacacaaactatagcccaattaaagccatttatagatgcaggcaatataacatcaggcacaacagcaacaacatggggatcatacataaacacaaccaaatttactacaacagccacaacaacttatacatatccaggcactacaactaacacagttactatgttaacctctaatgactcctggtacagaggaacagtatataacaatcaaattaaagagttaccaaaaaaagcagctgaattatactcaaaagcaacaaaaaccttgctaggaaacaccttcacaactgaagactgcacactagaataccatggaggactatacagctcaatatggctatcccctggtagatcttactttgaaacaccaggagcatacacagacatgaagtacaacccattcacagacagaggagaaggcaacatgttatggatagactggctaagcaaaaaaaacatgaactatgacaaagtacaaagtaaatgcttagtatcagacctacctctatgggcagcagcatatggttatttagaattctgctctaaaagcacaggagacacaaacatacacatgaatgccagactactaataagaagtccttttacagacccccagctaatagcacacacagaccccactaaaggctttgtaccctattccttaaactttggaaatggtaaaatgccaggaggtagcagcaatgttcccataagaatgagagctaagtggtaccccactttattccaccaacaagaagttctagaggccttagcacagtcaggaccctttgcttatcactcagacattaaaaaagtatctctaggcataaaataccgttttaagtggatctggggtggaaaccccgttcgccaacaggttgttagaaacccctgcaaggaaccccactcctcggtcaatagagtccctagaagcatacaaatcgttgacccgaaatacaactcaccggaacttaccatccatgcctgggacttcagacgtggcttctttggcccgaaagctattcaaagaatgcaacaacaaccaactgctactgaatttttttcagcaggccgcaagagacccagaagggacacagaagtgtatcagtccgaccaagaaaaggagcaaaaagaaagctcgcttttccccccagtcaagctcctccgaagagtccccccatgggaggactcggaacaggagcaaagcgggtcgcaaagctcagaggaagagacccacaccgtctcccagcagctcaaacagcagcttcagcagcagcggatcctcggcgtcaagctcagagtcctgttccaccaagtccacaaaatccaacaaaatcaacatatcaaccctaccttattgccaaggggtggggccctagcatccttgtctcagattgcaccataa

SEQ ID NO: 162 - DNA, 2313 bp, Torque teno virus
atggcctatggcttgtggcaccgaaggagaagacggtggcgcaggtggaaacgcacaccatggaagcgccgctggaggacccgaagacgcagacctgctagacgccgtggccgccgcagaaacgtaaggagacgccgcagaggagggaggtggaggaggagatataggagatggaaaagaaagggcaggcgcagaaaaaaagctaaaataataataagacaatggcaaccaaactacagaaggagatgtaacatagtaggctacatccctgtactaatatgtggcgaaaatactgtcagcagaaattatgccacacactcagacgataccaactacccaggaccctttggggggggtatgactacagacaaatttactttaagaattctgtgtgacgagtacaaaaggtttatgaactactggacagcatctaacgaagacctagacctttgtagatatctaggagtaaacctgtactttttcagacacccagatgtagattttatcataaaaattaataccatgcctccttttctagacacagaactcacagcccctagcatacacccaggcatgctagccctagacaaaagagcaagatggatacctagcttaaaatctagaccaggaaaaaaacactatattaaaataagagtaggggcaccaaaaatgttcactgataaatggtacccccaaacagatctctgtgacatggtgcttctaactgtctatgcaaccacagcggatatgcaatatccgttcggctcaccactaactgactctgtggttgtgaacttccaggttctgcaatccatgtatgataaaacaattagcatattaccagacgaaaaatcacaaagagaaattctacttaacaagatagcaagttacattcccttttataataccacacaaactatagcccaattaaagccatttatagatgcaggcaatgtaacatcaggcgcaacagcaacaacatgggcatcatacataaacacaaccaaatttactacagcaaccacaacaacttatgcatatccaggcaccaacagacccccagtaactatgttaacctgtaatgactcctggtacagaggaacagtatataacacacaaattcaacagttaccaataaaagcagctaaattatacttagaggcaacaaaaaccttgctaggaaacaacttcacaaatgaggactacacactagaatatcatggaggactgtacagctcaatatggctatcccctggtagatcttactttgaaacaacaggagcatacacagacataaagtacaatccattcacagacagaggagaaggcaacatgttatggatagactggctaagcaaaaaaaacatgaactatgacaaagtacaaagtaaatgcttagtacgagacctacctctatgggcagcagcatatggatatgtagaattctgtgcaaaaagtacaggagacaagaacatatacatgaatgccaggctactaataagaagtccctttacagacccacaactactagtacacacagaccccacaaaaggctttgttccttactctttaaactttggaaatggtaaaatgccaggaggtagtagtaatgtgcctattagaatgagagctaaatggtatccaacattatttcaccagcaagaagtactagaggccttagcacagtcaggcccctttgcataccactcagacattaaaaaagtatctctgggtatgaaataccgttttaagtggatctggggtggaaaccccgttcgccaacaggttgttagaaatccctgcaaagaaacccactcctcgggcaatagagtccctagaagcttacaaatcgttgacccgaaatacaactcaccggaactcacattccatacctgggacttcagacgtggtctctttggcccaagagctattcaaagaatgcaacaacaaccaacaactactgacattctttcagcaggccgcaagagacccagaaaggacacggaggtgtaccaccccagccaagaaggggagcaaaaagaaagcttacttttccccccagtcaagctcctcagacgagtccccccgtgggaagactcgcagcaggaggaaagcgggtcgcaaagctcagaggaagagacgcagaccgtctcccagcagctcaagcagcagctgcagcaacagcaaatcctgggagtcaaactcagactcctgttcgaccaagtccaaaaaatccaacaaaatcaagatatcaaccctaccttgttaccaagggggggggatctagcatcgttatttcaaatagcaccataa

SEQ ID NO: 163 - DNA, 2313 bp, Torque teno virus
atggcctatggctggtggcgccgaaggagaagacggtggcgcaggtggagacgcagaccatggaggcgccgctggaggacccgaagacgcagacctgctagacgccgtggccgccgcagaaacgtaaggagacgccgcagaggagggaggtggaggaggagatataggagatggaaaagaaagggcaggcgcagaaaaaaagctaaaataataataagacaatggcaaccaaactacagaaggagatgtaacatagtaggctacatccctgtactaatatgtggcgaaaatactgtcagcagaaactatgccacacactcagacgatactaactacccaggaccctttggggggggtatgactacagacaaatttactttaagaattctgtatgacgagtacaaaaggtttatgaactactggacagcatctaacgaagacctagacctttgtagatatctaggagtaaacctatactttttcagacacccagatgtagattttattataaaaattaataccatgcctccttttctagacacagaactcacagcccctagcatacacccaggcatgctagccctagacaaaagagcaagatggatacctagcttaaaatctagaccaggaaaaaaacactatattaaaataagagtaggggcaccaaaaatgttcactgataaatggtacccccaaacagatctttgtgacatggtgcttctaactgtctatgcaaccgcagcggatatgcaatatccgttcggctcaccactaactgactctgtggttgtgaacttccaggttctgcaatccatgtatgatgaaaaaattagcatattaccagaccaaaaatcacaaagagaaagcctacttactagcatagcaaattacattcccttttataataccacacaaactatagcccaattaaagccatttatagatgcaggcaatgtaacatcaggcacaacagcaacaacatgggggtcatacataaacacaaccaagtttactacaacagccacaacaacttatacatatccaggcaccaccacaaccacagtaactatgttaacctctaatgactcctggtacagaggaacagtatataacaaccaaattaaagacttaccaaaaaaagcagctgaattatactcaaaagcaacaaaaaccttgctaggaaacaccttcacaactgaagactacacactagaataccatggaggactgtacagctcaatatggctatcccctggtagatcttactttgaaacaccaggagcatatacagacataaagtacaatccatttacagacagaggagaaggcaacatgttatggatagactggctaagcaaaaaaaacatgaactacgacaaagtacagagtaaatgcttaatatcagacctacctctatgggcagcagcatatggatatgtagaattttgtgcaaaaagtacaggagaccagaacatacacatgaatgccaggctactaataagaagtccctttacagacccacaactactagtacacacagaccccacaaaaggctttgttccttactctttaaactttggaaatggtaaaatgccaggaggtagtagtaatgtgcctattagaatgagagctaaatggtatccaacattatttcaccagcaagaagtactagaggccttagcacagtcaggcccctttgcataccactcagacattaaaaaagtatctctgggtatgaaataccgttttaagtggatctggggtggaaaccccgttcgccaacaggttgttagaaatccctgcaaagaaacccactcctcgggcaatagagtccctagaagcttacaaatcgttgacccgaaatacaactcaccggaactcacattccatacctgggacttcagacgtggcctctttggcccgaaagctattcagagaatgcaacaacaaccaacaactactgacattttttcagcaggccgcaagagacccaggagggacaccgaggtgtaccactccagccaagaaggggagcaaaaagaaagcttacttttccccccagtcaagctcctcagacgagtccccccgtgggaagactcgcagcaggaggaaagcgggtcgcaaagctcagaggaagagacgcagaccgtctcccagcagcccaagcagcagctgcagcaacagcgaatcctgggagtcaaactcagactcctgttcaaccaagtccaaaaaatccaacaaaatcaagatatcaaccctaccttgttaccaagggggggggatctagcatccttatttcaagtagcaccataa

SEQ ID NO: 164 - DNA, 2313 bp, Torque teno virus
atggcctatggctggtggcgccgaaggagaagacggtggcgcaggtggagacgcagaccatggaggcgccgctggaggacccgaagacgcagacctgctagacgccgtggccgccgcagaaacgtaaggagacgccgcagaggagggaggtggaggaggagatataggagatggaaaagaaagggcaggcgcagaaaaaaagctaaaataataataagacaatggcaaccaaactacagaaggagatgtaacatagtaggctacatccctgtactaatatgtggcgaaaatactgtcagcagaaactatgccacacactcagacgataccaactacccaggaccctttggggggggtatgactacagacaaatttactttaagaattctgtatgacgagtacaaaaggtttatgaactactggacagcatctaacgaagatctagacctttgtagatatctaggagtaaacctgtactttttcagacacccagatgtagattttatcataaaaattaataccatgcctccttttctagacacagaactcacagcccctagcatacacccagacatgctagccctagacaaaagagcaagatggatacctagcttaaaatctagaccgggaaaaaaacactatattaaaataagagttggggcaccaaaaatgttcactgataaatggtacccccaaacagatctttgtgacatggtgcttctaactgtctatgcaaccacagcggatatgcaatatccgttcggctcaccactaactgactctgtggttgtgaacttccaggttctgcaatccatgtatgatgaaaacattagcatattaccaaccgaaaaatcaaaaagagatgtcctacatagtactatagcaaattacactcccttttataataccacacaaattatagcccaattaaggccatttgtagatgcaggcaatctaacatcagcgtcaacaacaacaacatggggatcatacataaacacaaccaagtttaatacaacagccacaacaacttatacatatccaggcagcacgacaaccacagtaactatgttaacctgtaatgactcctggtacagaggaacagtatataacaatcaaattagcaagttaccaaaacaagcagctgaattttactcaaaagcaacaaaaaccttgctaggaaacacgttcacaactgaggaccacacactagaataccatggaggactgtacagctcaatatggctatccgctggtagatcttactttgaaacaccaggagcatatacagacataaagtataatccattcacagacagaggagaaggcaacatgttatggatagactggctaagcaaaaataacatgaactatgacaaagtacaaagtaaatgcttaatatcagacctacctctatgggcagcagcatatggatatgtagaattttgtgcaaaaagtacaggagaccagaacatacacatgaatgccagactactaataagaagtccctttacagacccacaactactagtacacacagaccccacaaaaggctttgttccttactctttaaactttggaaatggtaaaatgccaggaggtagtagtaatgtgcctattagaatgagagctaaatggtatccaacattatttcaccagcaagaagtactagaggccttagcacagtcaggcccctttgcataccactcagacattaaaaaagtatctctgggtatgaaataccgttttaagtggatctggggtggaaaccccgttcgccaacaggttgttagaaatccctgcaaagaaacccactcctcgggcaatagagtccctagaagcttacaaatcgttgacccgaaatacaactcaccggaactcacattccatacctgggacttcagacgtggcctctttggcccgaaagctattcagagaatgcaacaacaaccaacaactactgacattttttcagcaggccgcaagagacccaggagggacaccgaggtgtaccactccagccaagaaggggagcaaaaagaaagcttacttttccccccagtcaagctcctcagacgagtccccccgtgggaagactcgcagcaggaggaaagcgggtcgcaaagctcagaggaagagacgcagaccgtctcccagcagctcaagcagcagctgcagcaacagcgaatcctgggagtcaaactcagactcctgttcaaccaagtccaaaaaatccaccaaaatcaagatatcaaccctaccttgttaccaagggggggggatctagcatccttatttcaaatagcaccataa

SEQ ID NO: 165 - DNA, 2313 bp, Torque teno virus
atggcctatggctggtggcgccgaaggagaagacggtggcgcaggtggagacgcagaccatggaggcgccgctggaggacccgaagacgcagacctgctagacgccgtggccgccgcagaaacgtaaggagacgccgcagaggagggaggtggaggaggagatataggagatggaaaagaaagggcaggcgcagaaaaaaagctaaaataataataagacaatggcaaccaaactacagaaggagatgtaacatagtaggctacatccctgtactaatatgtggcgaaaatactgtcagcagaaactatgccacacactcagacgataccaactacccaggaccctttggggggggtatgactacagacaaatttactttaagaattctgtatgacgagtacaaaaggtttatgaactactggacagcatctaacgaagatctagacctttgtagatatctaggagtaaacctgtactttttcagacacccagatgtagattttatcataaaaattaataccatgcctccttttctagacacagaactcacagcccctagcatacacccaggcatgctagccctagacaaaagagcaagatggatacctagcttaaaatctagaccgggaaaaaaacactatattaaaataagagttgaggcaccaaaaatgttcactgataaatggtacccccaaacagatctttgtgacatggtgcttctaactgtctatgcaaccacagcggatatgcaatatccgttcggctcaccactaactgactctgtggttgtgaacttccaggttctgcaatccatgtatgatcaaaacattagcatattaccaaccgaaaaatcaaagagaacacaactacatgataatataacaaggtacactcccttttataataccacacaaactatagcccaattaaagccatttgtagatgcaggcaatgtaacaccagtgtcaccaacaacaacatggggatcatacataaacacaaccaagtttactacaacagccacaacaacttatacatatccaggcaccacgacaaccacagtaactatgttaacctgtaatgactcctggtacagaggaacagtatataacaatcaaattagccagttaccaaaaaaagcagctgaattttactcaaaagcaacaaaaaccttgctaggagacacgttcacaactgaggactacacactagaataccatggaggactgtacagctcaatatggctatccgctggtagatcttactttgaaacaccaggagtatatacagacataaagtataatccattcacagacagaggagaaggcaacatgttatggatagactggctaagcaaaaaaaacatgaactatgacaaagtacaaagtaaatgcttaatatcagacctacctctatgggcagcagcatatggatatgtagaattttgtgcaaaaagtacaggagaccaaaacatacacatgaatgccaaactactaataagaagtccctttacagacccacaactactagtacacacagaccccacaaaaggctttgttccttactctttaaactttggaaatggtaaaatgccaggaggtagtagtaatgtgcctattagaatgagagctaaatggtatccaacattatttcaccagcaagaagtactagaggccttagcacagtcaggcccctttgcataccactcagacattaaaaaagtatctctgggtatgaaataccgttttaagtggatctggggtggaaaccccgttcgccaacaggttgttagaaatccctgcaaagaaacccactcctcgggcaatagagtccctagaagcttacaaatcgttgacccgaaatacaactcaccggaactcacattccatacctgggacttcagacgtggcctgtttggcccgaaagctattcagagaatgcaacaacaaccaacaactactgacattttttcagcaggccgcaagagacccaggagggacaccgaggtgtaccactccagccaagaaggggagcaaaaagaaagcttacttttcctcccagtcaagctcctcagacgagtccccccgtgggaagactcgcagcaggaggaaagcgggtcgcaaagctcagaggaagagacgcagaccgtctcccagcagctcaagcagcagctgcagcaacagcgaatcctgggagtcaaactcagactcctgttcaaccaagtccaaaaaatccaacaaaatcaagatatcaaccctaccttgttaccaagggggggggatctggcatccttatttcaaatagcaccataa

SEQ ID NO: 166 - DNA, 2298 bp, Torque teno virus
atggcctatgggtggtggaggagacgccgcagaaggtggaagagatggaggagaaggcccaggtggagacgcccatggaggacccgcagacgcagacctgctagacgccgtggacgccgcagaacagtaaggagacgggagcgcgggaggtggaggaggcgctataggaggtggaggaaaaagggcaaacgcaggataaaaaagaaacttataataagacagtggcagccaaactataccagaaagtgcgacatattaggctacatgcctgtaatcatgtgtggagagaacactctaataagaaactatgccacacacgcaaacgactgctactggccgggaccctttgggggcggcatggccacccagaaattcacactcagaatcctgtacgatgactacaagaggtttatgaactactggacctcctcaaacgaggacctagacctctgtagatacaggggagtcaccctgtactttttcagacacccagatgtagactttatcatcctgataaacaccacacctccgttcgtagatacagagatcacaggacccagcatacatcctggcatgatggccctcaacaagagagccaggttcatccccagcctaaaaactagacctggcagaagacacatagtaaagattagagtgggggcccccaaactgtacgaggacaaatggtacccccagtcagaactctgtgacatgcccctgctaaccgtctacgcgaccgcagcggatatgcaatatccgttcggctcaccactaactgacactcctgttgtaaccttccaagtgttgcgcagcatgtacaacgacgcccttagcatacttccctctaactttgaacaggacgacaatgcaggccaaaaactttacaatgaaatatcatcatatttaccatactacaacaccacagaaacaatagcacaactaaagagatatgtagaaaatacagaaaaaatttccacaacaccaaacccatggcaatcaaattatgtaaacactattaccttcaccactgcacaaagtattacaactacaaccccatacaccaccttctcagacagctggtacaggggcacagtatacaaaaacgcaatcactaaagtgccacttgccgcagctaaactttatgaaacccaaacaaaaaacctgctgtctccaacatttacaggagggtccgagtacctagaataccatggaggcctgtacagctccatatggctatcagcaggccgatcctactttgaaacaaagggagcatacacagacatatgctacaacccctacacagacaggggagaagggaacatgttgtggatagactggctatccaaaggagattccagatatgacaaagcacgcagcaaatgtctaatagaaaaactacctatgtgggccgcagtatatgggtacgcagaatactgtgcaaaagccacaggagactctaacatagacatgaacgccagagtagtaatgaggtgtccatacaccgtaccccaaatgatagacacaagcgatcccctcagaggctttataccctatagctttaactttggaaagggaaaaatgcctggaggaacaaatcaagtccccataagaatgagagctaagtggtacccttgtctctttcaccaaaaagaagttctagaagctataggacagtcaggccccttcgcctaccatagtgatcagaaaaaagcagtactaggcctaaaatacagatttcactggatatggggtggaaaccccgtgtttccacaggttgttagaaacccctgcaaagacacccaaggttccacaggccctagaaagcctcgctcagtacaaatcattgacccgaagtacaacacaccagagcttaccatccacgcgtgggatttcagacgtggcttctttggcccaaaagctattaaaagaatgcaacaacaaccaacagatgctgaacttcttccaccaggccgcaagaggagcaggagagacaccgaagtcctgcaaagcagccaagaaaggcaaaaagaaagcttacttttacaacagctccacctccagggacgagtacccccgtgggaaagcttgcaagggttgcagacagaaacagaaagccaaaaagagcacgagggcaccctttcccagcagatcagagagcaggttcagcagcagaagctcctcgggagacagctcagagaaatgttcttacaactccacaaaatcctacaaaatcaacacgtcaaccctaccttattgccaagggatcagggtttaatttggtggtttcagattcagtaa

SEQ ID NO: 167 - DNA, 2298 bp, Torque teno virus
atggcttatgggtggtggaggagacgccgcaggaggtggaagagatggaggagaaggcccaggtggagacgcccatggaggacccgcagacgcagacctgctggacgccgtggacgccgcagaacagtaaggagacggaggcgcgggaggtggaggaggcgctataggaggtggaggaaaaagggcagacgcaggagaaaaaagaaacttataataagacaatggcagccaaactataccagaaagtgcaacatagttggttacatgccagtcatcatgtgtggagagaacactctaatcagaaactatgccacacacgcatacaactgctcctggccgggaccctttgggggcggcatggccacccaaaaatttactctgagaatactgtacgatgactacaaaagatttatgaactactggacctcctcaaacgaggacctagacctgtgcagatatagaggagctacactgtactttttcagagacccagatgtagactttattatactgataaacaccactcctccatttgtagacacagagattacagggcccagcatacatcccggcatgctggcactcaacaagagagcaagatttatacccagcttaaagactagacccagcagaagacacatagtaaagatcagagtgggggcccccaaactgtatgaggacaagtggtacccccagtcagaactttgtgacatgcccctgctaaccgtctatgcgaccgcaacggatatgcaatatccgttcggctcaccactaactgacactcctattgtaaccttccaagtgttgcgcagcatgtacaacgacgcccttagcatacttccctctaactttgaaggtgacgacagtgcaggcgcaaaactttacaaacaaatatcagaatacataccatactataacaccacagaaacaatagcacagttaaagggatatgtagaaaacacagaaaaaacccaaacaacacctaatccatggcaatcaaaatatgtaaacacaaaaccatttgacactgcacaaacaattacaaaccaaaagccatacactccattcgcagacacatggtacaggggcacagcatacaaagaagaaattaaaaatgtaccactaaaagcagccgaactgtatgaattacatactacacacctgttatctacaacattcacaggagggtccaaatacttagaataccatggaggcttatacagctccatatggctgtcagcaggccgctcctactttgaaacaaaaggagcatacacagacatttgctacaacccctacacagacaggggagaaggcaacatggtgtggatagactggctagtaaagacagactctagatatgacaagacacgcagcaaatgccttatagaaaaactacctctatgggctgcagtatacgggtacgcagagtactgcgccaaggccacaggagactctaacatagacatgaacgccagagtagttatcaggagcccctacactacacctcaaatgatagacaccaacgactctctaagaggctttatagtatacagctttaactttggaaagggaaaaatgcctggaggaacaaatcaagtccccataagaatgagagctaagtggtacccttgcctctttcaccaaaaagaagttctagaagctataggacagtcaggccccttcgcctaccatagtgatcagaaaaaagcagtactaggcctaaaatacagatttcactggatatggggtggaaaccccgtgtttccacaggttgttagaaacccctgcaaagacacccaaggttccacaggccctagaaagcctcgctcagtacaaatcattgacccgaagtacaacacaccagagcttaccatccacgcgtgggatttcagacgtggcttctttggcccaaaagctattaaaagaatgcaacaacaaccaacagatgctgaacttcttccaccaggccgcaagaagagcaggagagacaccgaagtcctgcaaagcagccaagaaaggcaaaaagaaagcttacttttccaacagctccagctccagcgacgagtacccccgtgggaaagctcgcaagggtcgcagacagaaacagaaagccaaaaagagcaggagggcaccctctcccagcagctcagagagcagcttcagcagcagaagctcctcggcagacagctcagggaaatgttcctacaaatccacaaaatcctacaaaatcaacaagtcaaccctattttattgccaagggatcaggctttaatttcctggtttcagattcagtaa

SEQ ID NO: 168 - DNA, 2298 bp, Torque teno virus
atggcctatgggtggtggaggagacgccgcaggaggtggaagagatggaggagaaggcccaggtggagacgccgctggaggacccgcagacgcagacctgctggacgccgtagacgccgcagaacagtaaggagacgcaggcgcgggaggtggaggagcagatataggagatggaggcgaaagggcagacgcaggcgaaaagaaaaactaataataagacaatggcagccaaactataccagaaagtgcaacattgtgggttacatgccagtaatcatgtgtggagaaaatactgttatcagaaactatgccacacacacatacgactgctcctggccaggaccctttgggggcggcatggccacccaaaaatttactctgagaatactgtacgatgactacaaaagatttatgaactactggacctcctcaaacgaggacctagatctctgcagatacagaggagcaaccctatactttttcagagacccagatgtagactttattatacttataaacactactcctccatttgtagacacagaaataacagggcccagcatacacccaggcatgctggcactaaacaaaagagctagattcattcccagtctaaaaaccagaccaggcaggagacacatagtaaaaataaaagtaggggcccctagaatgtatgaagacaagtggtacccccagtcagaactttgtgacatgcccctcctaacgatctatgcaaccgcaacggatatgcaacatccgttcggctcaccactaactgacactcctgttgtaaccttccaagtgttgcgcagcatgtacaacgacgcccttagcatacttccctctaactttgaagacgattcaagtccaggggctgcactttacaaacaaatatcagaatacataccatactataacaccacagaaacaatagcacagctaaagagatatgtagaaaacacagaaaaaacccaaacaacacttaatccatggcaatcaagatatgtaaacacaacactatttaacactgcagaaacaattgcaaaccaaaagccatacactaaattcgcagacacatggtacaggggcacagcatacaaagacgcaattaaagacataccactaaaagcagccgaattgtatgtaaaccaaaccaaatacctgttatctacaacattcacaggagggtccaaatacttagaataccatggaggcttatacagctccatatggctgtcagcaggccgctcctactttgaaacaaaaggagcatacacagacatttgctacaacccctacacagacaggggagaaggcaacatggtgtggatagactggctatcgaaaacagactcaaaatatgacaagacccgcagcaaatgccttatagaaaaactgccgctatgggcatcggtatacgggtacgcagaatactgtgccaaggccacaggagactctaacatagacatgaacgccagagtagttataagatgcccctacactacacctcaaatgatagacaccaccgacccaactagagggttcatagtatacagctttaactttggtaagggcaaaatgccgggaggtagcaatgaagtacccataagaatgagagccaaatggtacccctgcctctttcaccaaaaagaggtcctagaagccataggccagtcaggcccctttgcttatcacagcgatcaaaaaaaagcagttttaggtttaaaatacaaatttcactggatatggggtggaaaccccgtgttcccacaggttattaaaaacccctgcaaaaacactcaattttccacaggccctagaaagcctcgctcattacaaatcattgacccgaattacaacacaccaaagcttaccatccacgcttgggatttcagacttggcttctttggcccaaaagctattaaaagaatgcaacaacaaccaacagatgctgaacttcttccaccaggccgcaagaggagcaggagagacaccgaagtcctgcaaagcagccaagaaaggcaaaaaggaaacttacttttccaacagttccagctccagcgacgagtacccccgtgggaaagctcgcaagggtcgcagacaggaacacaaagccaaaaagagcaggagggcaccctctcccagcagctcagagagcagcttcagcagcagaagctcctcggcagacagctcagggaaatgttcctacaactccacaaaatccaacaaaatcaacacgtcaaccctaccttattgccaagggatcaggctttaatttgctggtttcagattcagtaa

SEQ ID NO: 169 - DNA, 2313 bp, Torque teno virus; identical to SEQ ID NO: 163

SEQ ID NO: 170 - DNA, 2202 bp, Torque teno virus
acggcttggtggtggggcagatggaggcgccgctggaggcctcgctatcgcagacgcacctggagggtacgaagaagacgacctagacgaacttttcgccgccgccgccgaggacgatatgtgagtaggcggaggcgccgccgctactacaggcgcagactgagacggggcagacgcagagggcgacgaaagagacacagacagactctagtcctcagacagtggcaaccagacattgtcagacactgtaaaattacaggatggatgccccttatcatctgtggctcagggagcacacagaacaattttataactcacatggacgactttcctcccatgggctactccttcgggggcaactttacaaacctctccttctccttagagggcatttatgaacaatttctgtaccacagaaacaggtggtctcgctccaaccatgacctagacctagccagatacaaaggcacaactctaaaactctacagacaccacaccttagactacatagtcagctacaacagaacaggccctttccagatcagtgacatgacctacctcagcacacaccctgcactcatgctactccagaaacacagaatagtagtacccagcctactcactaaacctaaaggcaagagatccataaaagttagaataaagccaccaaaactcatgctcaacaaatggtacttcaccaaagacatatgcagcatgggcctcttccaactacaggccacagcatgcaccctatacaacccctggctcagagacaccacaaaaagcccagtcataggcttcagagtacttaaaaacagtatttatacaaacctcagcaacctaccagaacatgatcaaaccagacaagccattagacgaaaactacacccagactccttaacaggatcaactccatatcaaaaaggctgggaatacagctacacaaaactaatggctccaatatactatcaagcaaatagaaacagcacatacaactggctaaattatcaaacaaactatgctcaaacattcaccaaatttaaagaaaaaatgaatgaaaaccttgcactaattcaaaaagagtattcataccactatcccaacaatgtcactacagaccttattggcaaaaacaccctcacacatgactggggtatatacagtccctactggctaacacccaccagaataagcctagactgggaaacaccctggacatatgtcagatacaatccactagcagacaagggcataggcaatgctgtctatgcacaatggtgctcagaacagaccagtaaattagatacaaaaaagagcaagtgcataatgaaagacctgccactgtggtgcatattttatggctatgtagattggataataaaatccacaggagtcagcagcgcagtcactgacatgagagtagccatcatcagcccctacaccgaaccagcacttatagggtcaagtccagacgtaggctacattccagtaagtgacaccttttgcaatggagacatgccgtttcttgctccatacatccctgtgggctggtggatcaaatggtaccctatgattgcacaccaaaaggaagtgtttgaggcaatagttaactgtggaccgtttgtgcccagagaccagaccactcccagttgggaaattaccatgggttacaaaatggactggttatggggtggctctcccctgccttcacaggcaatcgacgacccctgccagaagcccacccacgaactacccgatcccgatagacaccctcgcatgttacaagtctctgacccgacaaagctcggaccgaagacagtgttccacaaatgggactggagacgtgggatgcttagcaaaagaagtattaaaagagtccaggaggactcaacagatgatgaatatgttgcagggcctttaccaagaaaaagaaacaaattcgataccagagcccaagggctgcaaacccccgaaaaagaaagctacactttactccaagccctccaagagtcggggcaagagaccagctcagaagaccaagaacaagcaccccaagaaaaagagggtcagaaggaagcgctcatggagcagctccagctccagaaacagcaccagcgagtcctcaagcgaggcctcaaactcctcctcggagacgtcctccgactccggagaggagtccactgggaccccctcctgtcataa

SEQ ID NO: 171 - DNA, 2202 bp, Torque teno virus
acggcgtggtggtggggcagatggaggcgtcgatggaggcctcgctatcgcaaacgcacctggagattacggagacgacgacctagacgaacttttcgccgccgccgccgaagacaatatgtgagtaggcggaggcgccgccgctactacaggcgcagactgagacggggcagacgcagagggcgacgaaagagacacagacagactctagtcctcagacaatggcaaccagacgttgttagacactgtaaaattacaggatggatgccccttatcatctgtggctccgggagcacacagaacaattttataactcacatggacgactttcctcccatgggctactcctttgggggcaactttacaaacctcaccttctccttagagggcatatatgaacaatttctgtaccacagaaacaggtggtctcgctccaaccatgacctagacctagccagatacaaaggcacaactctaaaactctacagacaccacaccttagactacatagtcagctacaacagaacaggccccttccagatcagtgacatgacctaccccagcacacaccctgcacttatgctactccagaaacacagaatagtagtgcccagcgtactcactaaacctaaaggcaagagatccataaaggtcagaataaagccaccaaaactcatgcttaacaagtggtacttcaccaaagacatatgcagcatgggcctttttcaactacaggccacagcatgcaccctatacaatccctggctcagagacaccacaaaaagcccagtcataggcttcagggtacttaaaaacagtatctatacaaacctcagcaacctaccagaccatgagggttccagagaagccataagaaaaaaactacacccacaatccttaacaggacactctcccaaccaaaaaggctgggaatacagctatactaaactaatggctccaatatactactctgccaacagaaacagtacatataactggctaaactatcaagacaactatgtagccacatatactaaattcaaagtcaaaatgacagacaacttacaactaatacaaaaagaatactcataccactatcccaacaataccactacagaccttattaagaacaacacccttacacatgactggggcatatacagtccctactggctaacacccaccagaataagcctagactgggaaacaccctggacatatgtaagatacaacccactggcagacaaaggcataggcaatgctgtctacgcacagtggtgctcagaacagacaagcaaattagacccaaaaaagagcaagtgcataatgagagacctgccactgtggtgcatattttatggctatgtagattggatagtaaaatccacaggagtcagcagcgcagtcactgacatgagagtagccattagaagcccctacactgaaccagcacttatagggtcaactgaagatgtaggcttcattccagtaagtgacaccttttgcaacggagacatgccgtttcttgctccatacattcctgtgggctggtggatcaagtggtaccccatgattgcacaccaaaaggaagtgtttgagcaaatagtaaactgtggaccgtttgtgcccagagaccagaccactcccagttgggaaattaccatgggttacaaaatggactggttatggggtggctctcccctgccttcacaggcaatcgacgacccctgccagaagcccacccacgaactacccgatcccgatagacaccctcgcatgttacaagtctctgacccgacaaagctcggaccgaagacagtgttccacagatgggactggagacgtgggatgcttagcaaaagaagtattaaaagagtccaggaggactcaacagatgatgaatatgttgcagggcctttaccaagaaaaagaaacaagttcgataccagagcccaagggctccaaagccccgaaaaagaaagctacactttactccaagccctccaagagtcggggcaagagagcagctcagaagaccaagaacaagcaccccaagaaaaagagggtcagaaggaagcgctcatggagcagctccagctccagaaacagcaccagcgagtcctcaagcgaggcctcaaactcctcctcggagacgttctccgactccggagaggagtacactgggaccccctcctgtcataa

SEQ ID NO: 172 - DNA, 2202 bp, Torque teno virus
acggcgtggtggtggggcagatggaggcgccgctggaggcctcgctatcgcagacgcacctggagggtacgcagaagacgacctagacgaacttttcgccgccgccgccgaggacgatatgtgagtaggcggaggcgccgccgctactacaggcgcagactcagacggggcagacgcagagggcgacgaaagagacacagacagactctagtcctcagacaatggcaaccagacgttcttagacgctgtaaaattacaggatggatgccccttatcatctgtggctccggaagcacacagaacaattttataactcacatggacgactttcctcccatgggctactcctacgggggcaactttacaaacctcaccttctccttagagggcatatatgaacaatttctgtaccacagaaacaggtggtctcgctccaaccatgacctagacctagccagatacaaaggcacaactctaaaactctacagacaccacaccttagactacatagtgagctacaatagaacaggccctttccagatcagtgacatgacctacctcagcacacaccctgcacttatgctactccagaaacacagaatagtagtgcccagcctactcactaaacctaaaggcaagagatccataaaagttagaataaaaccaccaaaactcatgcttaacaagtggtacttcaccaaagacatatgcagcatgggcctttttcaactacaggccacagcatgcaccctatacaacccctggctcagagacaccacaaaaagcccagtcataggcttcagggtacttaaaaacagtatttatacaaacctcagcaacctaccagaccatgaaggagccagagaggccataagaaaaaaactacacccacaatccttaacaggatctgtcccaaaccaaaaaggttgggaatacagctacacaaaactaatggctcccatttactaccaagccattagaaacagcacatacaactggctaaactatcaacaaaattactcacaaacataccaaacctttaaacaaaaaatgcaagacaacttacaactaatacaaaaagaatacatgtaccactacccaaacaatgtaacaacagacatactaggcaaaaacacacttacacatgactggggcatatacagtccctactggctaacacccaccagaatcagcctagactgggaaacaccttggacatatgttagatacaatccactagcagacaagggcataggcaatgctgtctatgcacagtggtgctcagaacagaccagtaacttagatacaaaaaagagcaagtgcataatgaaagacctgccactgtggtgcatattttatggctatgtagattgggtagtaaaatccacaggcgtcagcagcgcagtgactgacatgagagtagccatcattagcccctacactgaaccagcacttatagggtcaagtccagaggtaggctacattccagtaagtgacaccttttgcaatggagacacgccgtttcttgctccatacatccctgtgggctggtggatcaagtggtaccccatgattgcacaccaaaaggaagtgtttgaggcaatagtaaactgtggaccgtttgtgcccagagaccagaccactcccagttgggaaattaccatgggttacaaaatggactggttatggggtggctctcccctgccttcacaggcaatcgacgacccctgccagaagcccacccacgaactacccgatcccgatagacaccctcgcatgttacaagtctctgacccgacaaagctcggaccgaagacagtgttccacaaatgggactggagacgtgggatgcttagcaaaagaagtattaaaagagtccaggaggactcaacagatgatgaatatgttgcagggcctttaccaagaaaaagaaacaagttcgataccagagcccaagggctccaaagccccgaaaaagaaagctacactttactccaagccctccaagagtcggggcaagagacgagctcagaagaccaagaacaagcaccccaagaaaaagagggtcagaaggaagcgctcatggagcagctccagctccagaaacagcaccagcgagtcctcaagcgaggcctcaaactcctcctcggagacgttctccgactccggagaggagtacactgggaccccctcctgtcataa

SEQ ID NO: 173 - DNA, 2358 bp, Torque teno virus
atggcacaggggaggcgcagatacagacggggttggcaacgcagggtgtatctgagacgcaggagacgcaggagacgaaagagacttgtactgactcagtggcaccccgcagttaggagaaaatgcaccatcacggggtacatgcccgtggtgtggtgcggacacggcagggccagctacaactacgcctggcattcagatgactgtataaaacagccctggccctttggagggtctctgtccaccgtgtcctttaaccttaaagtactgtatgacgaaaaccagaggggacttaacagatggacgtaccccaacgatcagctagacctcggccgctacaagggctgcaaactaacattctacagaaccaaaaataccaactacccaggaccctttggggggggtatgactacagacaaatttactttaagaattctgtatgacgagtacaaaaggtttatgaactactggacagcatctaacgaagacctagacctttgtagatatttaggagtaaacctgtacattttcagacacccagatgtagattttatcataaaaattaataccatgcctccttttctagacacagaaatcacagccgctagcatacacccaggcatactagccctagacaaaagagcaagatggatacctagcttaaaatctagaccaggaaaaaaacactatattaaaataagagtaggggcaccaaaaatgttcactgataaatggtacccccaaacagatctctgtgacatggtgcttctaactatctatgcaaccgcagcggatatgcaatatccgttcggctcaccactaactgacactgtggttgtgaacttccaggttctgcaatccatgtatgatgaaaacattagcatattaccagaccaaaagacacaaagagagaaactacttactagcatatcaaactacattcccttttataataccacacaaactatagcccaattgaagccatttgtagatgcaggcaataaagtatcaggcacaacaacaacaacatgggcatcatacataaacacaaccagatttactacaacagccacaacaacttatacatatccaggctctaccactaacacagtaactatgttaacctctaatgactcctggtacagaggaacagtatataacaatcaaattaaaaacttaccaaaacaagcagctgaattatactcaaaagcaacaaaaaccttgctaggaaacaccttcacaactgaagactacacactagaataccatggaggactgtacagctcaatatggctatcccctggtagatcttactttgaaacaccaggagcatacacagatataaagtacaatccatttacagacagaggagaaggcaacatgttatggatagactggctaagcaaaaaaaacatgaactatgacaaagtacaaagtaaatgcttagtatcagacctacctctatgggcagcagcatatggatatgtagaattttgtgcaaaaagtacaggagaccagaacatacacatgaatgccaggctactaataagaagtccctttacagacccacagctactagtacacacagaccccacaaaagcctttgttccctactctttaaactttggaaatggtaaaatgccaggaggtagtagtaatgtgcctattagaatgagagctaaatggtatcccactttattccaccaacaagaagttctagaggctttagcgcagtcaggacccttcgcttatcactcagacattaaaaaagtatctctaggcataaaataccgttttaagtggatctggggtggaaaccccgttcgccaacaggttgttagaaatccctgcaaggaaccccactcctcgggcaatagagtccctagaagcatacaaatcgttgaccagaaatacaactcaccggaacttaccatccattcctgggacttcagacgtggcttctttggcccgaaagctattcaaagaatgcaacaacaaccaactgctactgaatttttttcagcaggccgcaagagacccagaagggacacagaagtatatcagtccgaccaagaaaaggagcaaaaagaaagctcgcttttccccccagtcaagctcctccgaagagtccccccgtgggaggactcggacaggaagcaaagcgggtcgcaaagctcagaggaagagacgcagaccgtctcccagcagctcaagcagcagctgcagcaacagcgaatcctgggagtcaaactcagactcctgttctaccaaatccaaagaatccaacaaaatcaagatatcaaccctaccttgttaccaagggggggggatctagcatccttatttcaaatagcataa

SEQ ID NO: 174 - DNA, 2247 bp, Torque teno virus
atggcgtggacctggtggtggcagaggaggcgccgaaggtggccgtggagaaggagaaggtggagaagactacgcacaagaagacctagacgccttgttcgacgccgtcgcaagagatacagagtaaggagacggaggcggtggggaaggagacgtgggcgacgcacataccttagacgcggacttaaaaagagaaaaaggagaaaaaaactcagactgactcagtggaaccctagcacaattaggggatgtacaattaagggaatggcgcccctaatagtgtgcggccacaccatggctggcaataactttgccatccgaatggaggactatgtatctcagattaaaccgttcggagggtccttcagtaccaccacctggagcttaaaagtactgtgggacgagcacaccagattccacaacacctggagctacccaaacactcagctagacttagccaggttcaaaggagtaaccttctacttctacagagacaaagacacagactttattataacctatagctccgtgccaccttttaaaatagacaaatactcctcagccatgctacacccaggcatgcttatgcagagaaaaaagaagatattattacccagctttacaaccagacctaggggcagaaaaaaagttaaagtacacataaaacctcctgtcttatttgaagacaaatggtacacccagcaggacctgtgcgacgttaatcttttgtcacttgcggtttctgcggcttcctttagacatccgttctgcccaccacaaactgacaacatttgcataaccttccaggtgttgaaagacaagtattacacacaaatgtcagttacaccagataccgcaggtacaaaaaaagacgacgaaattcttgaccacttatactcaactgcagaatactatcaaactgttcacacacaaggaataattaacaaaacacaaagagtagctaaattctccacctctaataataccctaggtgaccaaagtgagatatcattatatttaaaccaaccaacaacaactaacataggaaacacgttatccacaggccataactcagtgtatggctttccatcatacaacccacaaaaagacaaacttagaaaaatagcagactggttttggacacaggaagccaacaaagagaatgtagttacaggctcatactcaatgcctactaacaaagcagtaggctatcacctaggaaaatatagccctatattcctaagttcatacagaaccaacctacaatttagaacagcatacacagacgttacatacaacccactaaatgacaaaggtaaaggcaatgaaatttgggtacaatatgtaacaaaaccagacactgtgttcaaccccacacagtgtaaatgccatgtaatagatttacccttgtggtcagcattccatggatacatagactttgtacaaagtgaactaggaattcaagaagaaatactaaacattgccattatagtagttatatgtccatacacaaaacctaaactagtacatgagacaaacccaaaacaaggctttgtattctatgacactcaatttggagacggtaaaatgccagagggctcaggcctagtaccgatatactaccaaaacagatggtatcctagaataaagtttcagagtcaagtagtgcatgactttatactaacaggcccctttagctacaaagatgacctaaaaagcacagtactaacagtagaatacaagttcaaattcttatggggcggcaatatgattcccgaacaggttatcagaaacccttgtaaaacagaaggacacgatctccctcacaccagtagactccatcgcgacttacaagttgttgacccacacaccgtgggcccccaatgggcgctccacacctgggactggcgacgtggactctttggttcagaggctatcaaaagagtgtctgaacaacaagtacatgatgaactgtattacccaccttcaaagaaacctcgattcctccctccaatatcaggcctccaagagcaagaaagagactacagttcgcaggaggagaaagaacagtcctcctcagaagaagagacggacccgaagaaaaaagagcaaaaacagcagcagcgactccacctccagttccaagagcagcagcgactcggaaaccaactccgactcatcttccgagagctacagaaaacccaagcgggtctccacttaaatcctatgttatcaaaccggctgtaa

SEQ ID NO: 175 - DNA, 2181 bp, Torque teno virus
atggcatggggatggtggaagcgacggcggcgctggtggttccggaagcggtggacccgtggcagacttcgcagacgatggcctagaccagctcgtcggcgccctagacgacgaagagtaaggagacgcagacgatggaggagggggcgacctagacgcagactgtaccgacgctacagacgcaaaaaacgtaggagacgaaagcccaaaataatcttaaaacaatggcagccagacattgtaaagaggtgctacatagtgggctacattcctgccataatatgcggggcgggcacctggtcccacaactacaccagccaccttctagacattatccccaaaggaccctttggagggggacacagcaccatgagattctctctaaaagtgctcttcgaagagcacctcagacacctaaacttttggacacgtagtaaccaggatctagaacttgtaagatacttcagatgctcctttaggttttacagagaccaacacacagactacttagtgcactacaacagaaaaacacccctgggaggcaacagactgacagcacctagccttcacccaggggtgcagatgctaagcaaaaacaaaataatagtacccagctatgatactaaacctaagggcaaaagctatgtaaaagtaactatagcaccccccactctactaactgacaagtggtactttgctaaagacgtttgtgacacaaccttggttaacttagacgttgtactctgcaacttgcggtttccgttctgctcaccacaaactgacaacccttgcatcactttccaagttctccattctatctataacgacttcctctctatagtagatactcaagaatataaaaataattttgttactaccttatctacaaaactaggcacaacatgggggtcaagacttaacacctttagaacagaagggtgctacagtcacccaaaactacctaaaaaacaggttacagctgctaatgacagtacatactttacacaaccagacggactatggggagatgcagttttcgagactaaagatactactattattaccaaaaacatggaatcatatgcaacatcagccaaacaaaggggagtgaacggagaccccgcattttgccatcttacaggcatatactcacctccctggctaacaccaggaagaatatccccagaaaccccaggactttacacagacgtgacttacaacccatacgcagacaaaggagtgggaaaccgaatatgggtagactactgcagtaaaaaaggcaataaatatgacaatacaagtaaatgccttttagaagacatgccactatggatggtcacctttggctacgtagactgggtaaaaaaagagactggcaactggggcattccactatgggccagagtactaataagaagcccctacacagtgccaaaactttacaacgaagcagacccctcctacggatgggttcctatctcctattattttggagaaggaaaaatgccaaacggagacatgtacgtacccttcaaagttagaatgaagtggtacccgtccatgtggaaccaagaaccagtactaaatgacttagcaaagagcggaccgtttgcatacaaagacacaaaaaccagtgtgactgtgactactaaatacaaatttacatttaacttcgggggcaaccccgtaccctcacagattgtacaagatccctgcacccagcccacctatgacatccccggcaccggtaacctgcctcgcagaatacaagtcattgacccgaaagtcctcggtccccactactcattccaccggtgggacttcaggcgtggcctctttggccaacaagctattaagagagtgtcagaacaacaaacaacttctgagtttttattctcaggtccaaagagacccagaatcgatcaagggccttacatcccgccagaaaaaggctcagattcactccaaagagaatcgagaccgtggagcacctcggagagcgaggcagagacagaagccccctcggaagaagagccggagaaccaagaagagcaagtactccagttgcagctccgacagcagctccgagaacagcgaaaactcagacagggaatccagtgcctcttcgagcaactgataacaacccagcagggggtgcacaaaaacccattgttagagtag

SEQ ID NO: 176 - DNA, 2292 bp, Torque teno virus
atggcctatggctggtgggcccggagacggagacgctggcgccgctggaagcgcaggccctggagacgccgatggaggacccgcagacgcagacctcgtcgccgctatagacgccgcagacatgtaaggagacggagacgtgggaggtggaggaggaggtacagaaaatggcgcagaaaaggcaggagaaggggcaaaaaaaagattataataagacagtggcagcccaactacaggagacgctgcaacataataggctacatgcccgtgcttatctgtggcaacaatactgtgtccagaaactatgccacacactcagatgactcctacctgccaggaccctttggagggggcatgaccactgataaattcaccctaagaatactctatgatgagtactgtagattcatgaactactggacagcctctaacgaggacctggacctctgcagatacagaggctgtactctgtggttcttcagacacccagatgtagactttattatccttataaacaccatgtcgcccttcctcgacacccagctcacaggccccagcatacacccgggactaatggcccttaacaagagagccagatggatccccagcctaaaaagcagaccgggtagaaagcacgtagttaaaattagagtaggcgctcccagaatgttcacagataaatggtacccccagtcagatctgtgtgacctccccctactaactatctttgccagtgcagcggatatgcaatatccgttcggctcaccactaactgactctgtggttgtgggtttccaggttctgcaatccatgtacaatgactgccttagcatacttcctgaaaattttaacggcaatggcaaaggcaaagctttacatgacaacataactaagtatctccctaactataacactactcaaacactagctcagctaaaaccgtacatagataacacatccacaggaagcacaaataactggagcagctatgtaaatacatcaaaatttacaactgcttcaaaaaccattacaacctcagcagaaggcccatactatactttcgcagatacctggtacagaggcactgcatacaacaatagcattacgaacgttcctttacaggcagcacaactatatcacgacacaaccaaaaaactactaggcacaacatttacaggagggtccccctacctagaataccacggaggcctttactcctccatttggctatctgcaggtcgctcctactttgaaacaaaaggcacatacacagatataacctacaacccttttacagacagaggacaaggtaacatggtatggatagactgggtatccaaatatgactcagtttactctaaaacacaaagcaaatgccttatagaaaacctgccactgtgggcatcagtatatggatacgcagaatactgcagcaaatccacaggagacacaaacatagaacaaaactgcagagtagttataagaagccccttcactaaccctcagctgctagaccataacaacccactaagagggtacgttccctactccataaactttggcaacggaaaaatgcctgggggaagcagtcaggtccccataagaatgagaagcaagtggtaccctactctatttcaccaaaaagaagtgttagaggccatagcgcaggcgggccccttcgcgtaccacagtgatcagatgaaagtgtcactaggcatgaaatacgcctttaagtgggtgtggggtggcaaccccgtatcccaacaggttgttagaaacccctgcaaggacaccggtgtttcctcgggcaatagagtccctcgatcagtacaaatcgttgacccgaagtacaacactccagaacttgcaatacatgcctgggacttcagacgtgcctgtttggcccaaaagctattaagagaatgcaaacagaaccgtaccctactgaacttctttcgccagggcgaaaaagatacaggagagacacagaagctctactccccagccaagaagaacaacaaaaagaaaacttatttttcctcccaatcaagcagctccgaccaatcccccgttggaggagtcggaccaaagccaaagcgaggaagagggggtccaacaagagacgcagacactctcccagcagctccagcagcagctcaaggagcagcagctcatgggggtccaactccgagccctgtaccaacaattacaacgggtccaacaaaacacacatatcgaccctacctttttgcaaggggggcgggcgtaacatctttatttcaaacagcgtag

SEQ ID NO: 177 - DNA, 2283 bp, Torque teno virus
atggcgtggtggggcagatggagaaggtggccgcggcgccggtggaggagatggcggcgccgccgtagaaggagactaccaacaagaagaactcgacgagctgttcgcggccttggaagacgaccaagaaagacggtaaggagacgccggcgccgacccagacgcacttaccgacgggggtggcgacgcagacggtacataagacgcaggaggggacgcagaaagaaactgactctgactatgtggaaccccaacatagtgaggagatgtaacatagagggagggctgcctctaatactgtgtggagaaaacagggccgcatttaactacgcctaccactcagaggactacacagagcagccattccccttcggtggaggaatgagcaccaccacattctcactgagaggcctctatgaccagtacacaaaacacatgaacagatggacgttctcaaacgaccagctagacctcgccagatacaggggctgcaaattcaggttttacagacaccccacctgtgactttatagtgcactacaacctggttcctcctctaaagatgaaccagttcaccagtcccaacacgcacccgggactcctcatgctgactaaacacaaaataataatacccagcttcttaacaagaccagggggtcgcagattcgtaaagatcagactgcccccccctaagctgtttgaagacaagtggtacacccagcaggacttgtgcaaacaaccgttagttactctaaccgcaaccgcagcttccttgcggtatccgttctgctcaccacaaacgaacaaccccaactgtaccttccaggtactgcgcaaaaattaccacaaagtaataggtacttcctcaacaaacagtgaggacgtgaccccctttgaaaactggctatataatacagcctcacactatcaaacttttgccaccgaggcacaagttggtagaataccaagctttaacccagacggtacaaaaaatacaaaagaatctgaatggcaaaattactggtccaaaaaaggtgaaccatggaaccctaatagtagttacccacatacaactacaaatcaaatgtacaaaataccttttgacagcaactatggctttccaacttacaaaccaataaaagaatacatgttacaaagaagagcatggagtttcaaatatgaaacagacaacccagttagcaaaaagatctggccacaacctaccacaacaaaaccaacaatagactactatgaataccacgcaggctggttcagtaacatcttcataggccccaacagacacagcttacaattccaaacagcatacgtagacaccacatacaacccactgaatgacaaaggaaagggcaacaagatatggtttcagtatcacagcaaagtaaacacagacctcagagacagaggcatctactgcctcctagaagacatgcccctgtggtctatgacctttggatacagtgactatgtcagcacacagctaggcccaaacgtggaccacgagactcaaggccttgtgtgcataatatgcccgtacactgagcccccaatgtatgacaagaccaatccaaacagtggctatgtagcatatgacacaaactttggaaatggcaagatgccgtcaggcagaagccaggtacccgtgtactggcagtgcagatggaggcccatgttgtggttccagcagcaagtactgaatgacatctcaaaaagtggaccgtacgcatacagagacgaactgaaaaactgttgcctgactgcttactacaacttcatttttgactgggggggcgacatgtattacccgcaggtcattaaaaacccctgcgcagacagcggactcgtacccggtaccagtagattcactcgagaagtacaagtcgttagcccgctgtccatgggcccccagtacatcctccatctcttcgaccaaagacgcgggttctttagttcaaacgctcttaaaagaatgcaacaacaacaagaatttgatgagtcttttacagtcaaacctaagcgacccaaactttctacagccgcccacgtcgagcagcaagaagaagactcgagttcaagggaaagaaaatcggggtcctcacaagaagaagtccaggaagaagtcctccagacgccggagatccagcttcacctccagcgaaacatcagagaacagctgcacatcaagcagcagctccaactcctgttactccaattattcaaaacacaagcaaatatccacctgaacccacgttttataagcccataa

SEQ ID NO: 178 - DNA, 2319 bp, Torque teno virus; identical to SEQ ID NO: 103

SEQ ID NO: 179 - DNA, 1281 bp, Torque teno virus
atggcatggggatggtggagacgaaggcgcaagtggtggtggagacgccggttcgcccgaagcagacttcgcagacgacggattagacgccctcgtcgccgcactcgacgaagaacagtaaggaggcgcagacaatggaggagggggcgacccagacgcagactgtttaagagaaagagacgctttaagagacgcagacgaaaagctaagataaaaataactcagtggcagcctagctcagtgaagagatgttttgttataggatactttccattagtaatatgtggacccggaaggtggtcagaaaactttactagtcacatagaagacaaaataagcaaaggaccctttgggggagggcatagtactagcagatggtccttaaaagtactgtacgaagagttccaaagacaccacaacttttggacaagaagcaacaaagacctagagttagttagattctttggaagtagttggagattttacagacacgaggacactgactatatagtgtactactctagaaaggctccccttggaggtaaccttctaacagcacccagcctacacccaggagcagccatgcttagcaaacacaaaatagtagtacccagttttaaaaccagacccggtggaaaacccaccgttaaaattaatattaaaccccctacaacactaatagacaaatggtacttccagaaagacatttgtgacacaaccttccttaacttgaacgttgtactctgcaacctgcggtttccgttctgctcaccacaaactgacaacatttgtgtaaccttccagatattgcatgaggtttaccacaattacataagcataactgcaaaagagttacttacaggcacagaatggagacagtactacaaaaactttttaaacgcagcactaccaaatgacagatctgtaaataaattaaacacttttagcacagaaggagcctacagccacccacaaataaaaaaacatacagaaaatataacaggttcaggagacaaatactttagaaaaaaagatggactgtggggagatgctattcacattacagaccaacaaaacagaacagaagttatagacttaatattaaaaaatgcagaaaactacctcaaaaaagtacaacaggaataccaaggacaggaaaatttaaaaaaccttatacatcccgtcttttgtcagtacgtaggcatatttgggcagcccactactaaactaccacagaataagcccagaaattccaggcctgtacaaagacataatatataa

SEQ ID NO: 180 - DNA, 2220 bp, Torque teno virus
atgtcctggtggggatggcgccgccgatggtggtggaagccacggaggcgatggagacgcaggagggcgcgccgcccgagacgactaccgcgacgacgatatagaagacctactcgccgctatcgaggcagacgagtaaggaggcgccgcgcggggggctggcgggggcgacgcagatactcccgacgctatagcagacgactgactgtcagacgaaagaaaaagaaactaactcttaagatctggcagccacagaatatcaggagatgtaagataaggggtctactgcccctcctgatatgcggacacacccgatctgcctttaactatgccatccactcggatgacaagaccccccaacagcagagtttcgggggtgggctcagcaccgttagcttctccctgaaagtcctattcgacccgaaccagaggggacttaacaggtggtcggccagcaacgaccagcttgacctcgcccggtacacgggctgcacgttctggttctacagacacaaaaagactgactttatagtgcagtatgatgtcagcgcccccttcaaactagacaaaaacagttgtcccagctaccaccccttcatgctcatgaaggccaaacacaaggtcctcatccccagttttgacactaaacccaaaggcagagaaaagataaaactaaggatacagccccccaagatgttcatagataagtggtacactcaggaggacctatgccccgttattcttgtgacacttgtggcgaccgcagcttcctttacacatccgttctgctcaccacaaactgccaacccttgcatcaccttccaggttttgaaagaattctattaccaagccatggggtacggcacaccagaaaccacaatgagcacaatatggaacaccctctacacaactagcacctactggcagtcacacttaaccccacagtttgtcagaatgcccaaaaacaatcctgataacactgcgaacactgaggccaataagtttaatgagtgggttgacaaaacgtttaaaacaggcaagttagttaaatacaactataaccagtataaacctgacatagagaaactaaccctactaagacaatactactttcgatgggagacacagcatacaggggtcgcagtcccacctacgtggactacccccacaacagacagatacgagtaccacgtaggcatgttcagtcccatcttcctcaccccttatagatcagcgggcctagactttccgtacgcctacgcagacgtcacatacaatcccctcacagacaaaggggtgggcaaccgcatgtggtaccagtacaacactaagatagacacccagttcgacgccaaatgctgtaagtgcgtcctagaggacatgcccctctatgccatggccttcggccacgcagactttctagaacaggagataggagagtaccaggacctagaggccaacggatacgtgtgtgttatcagtccctacaccaagccccccatgttcaacaaacacaaccctcagcagggatacgtgttctatgactcacagtggggcaatggcaaatggatagacggcaccgggttcgtcccagtgtactggctgaccagatggagagtagaactgctatttcaaaagcaagtactctcagacctcgccatgtcagggcccttcagctatccagacgaacttaagaacacagtactgacggccaagtacagatttgactttaagtggggtggcaatctcttccaccaacagaccattagaaacccctgcaaacccgaagagacctcgaccggtagaatccctcgcgatgtacaagtcgttgacccggtcaccatgggcccccgattcgtctttcactcctgggactggaggagagggttccttagtgacagagctctcaaaagaatgtttgagaaaccgctcgattttgagggatttacagcgactccaaaacgacctcgcatactccctcccacagagggacagctcgcccgagagcaaaaagagcaagaagaaagctcagattcgcaggaagaaagcagccttaccccgctcgaagaagtcccgcaagagacgaagctacgactccacctcagaaagcagctccgagagcagcgaagcatcagacaccaactcagaaccatgttccagcagcttgtcaagacgcaagcgggcctacacctaaacccccttttatcttcccagctgtaa

SEQ ID NO: 181 - DNA, 2001 bp, Torque teno virus
atgtggaatccatccacaattagagcatgtaacataaagggtgctataaaccttgtaatgtgcggacacactcaggcaggcagaaactatgccattagaagtgaagacttttatcctcaaatacaaagctttggtgggtcatttagtacaactacatggagccttagagtactgtttgatgaataccaaaagttccacaacttttggacatatcctaatactcagctagatctatgtagatataaatatgctatatttaccttttacagagaccctaaagtagactacattgttatatacaacacaaatccaccatttaaaattaacaaatacagtagtccctttttacaccccggacttatgatgttacaaaaaaaaaaaatactaatacctagctttcaaacaaaaccagggggcaaatctagaattaaggttaaaattaagccccctgctctatttgaagacaagtggtacactcaacaagacttgtgtccagtaaacctgttgtcacttgcggtttccgcctgcagctttatacatccgttctgctcaccagaaagtgacacaatatgcatgacatttcaggtattgcgagagttttactacacacacctaactgtcactccaaccacaactacctccacaccagaaaaagacaaaaaaatatttaatgaccaattatactccaacgctaacttttatcaatcgctacacgcatcagcgttcttaaacattgctcaggcacctgctatacatggccacaatggaataccaaacaacagtaggtatttaagttccacaggtacagaaacaagttttagaactggaaacaatagtatatatggacaaccaaattataaaccaattccagagaaattaacagaaataagaaagtggtttttcaaacaagctacaacacctaatgaaattcatggcacatatggaaaaccaacatatgatgcagtagactaccacttaggcaaatacagtccaatattcttaagtccatacagaactaacacacaatttcccactgcatacatggatgtaacttataatccaaatgtagataaaggaaaaggcaacaaaatatggcttcaatcagtaacaaaagaaacatctgattttgactcacgtagctgcagatgtataatagaaaacttacccatgtgggccatggttaacgggtactcagactttgcagagtctgaattaggatctgaagtacacgctgtatatgtttgctgtattatttgtccttacacaaaacctatgctatataacaaaacaaacccagcaatgggctatatattttatgatactttatttggcgacggaaaactaccatcaggtccaggtcttgttccattttattggcaaagcagatggtatccaaaactagcttggcaacaacaagtactacatgatttttatttgtgtggcccctttagctacaaagatgacctcaaaagctttactataaacacaacttacaagtttaaattcttatggggtggaaatatgattcccgaacaggttatcaaaaacccgtgcaaaacaacagatccaacatacaccctgtccgatagacagcgtcgcgacctacaagttgttgacccaattaccatgggcccgcagtgggaattccacacctgggactggcgacgcggactgtttggacaaaatgctcttagaagagtgtcagaaaaaccaggagatgatgcagagtattatgcgcctccaaaaaaacctagatttttcccaccaacagacctcgaagagcaagaaaaagactcagattcacaggaggagacgagactcctattccacccgtcgccgccaaggagccaagaagagatccagcaagagcagcagcgagacatccacctcagactcggacaacaactcagaatcagacagcagctccagcaagtgttcttacaagtcctcaaaacgcaagcgaacctccacataaatccattattcttaaaccaacaataa

SEQ ID NO: 182 - DNA, 2238 bp, Torque teno virus
atggcatggggatggtggagacggtggcgccggtggcccaccagacgctggaggagacgccgtcgccggcgccccgtacggagaacaagagctcgccgacctgctcgacgctatagaagacgacgaacagtaagaaccaggcggaggcggtgggggcgcagacggtacagacggggctggagacgaaggacttatgtaaggaaggggcgacacagaaaaaagaaaaagagactcgtactgagacagtggcagccagccaccagacgcagatgcactataactgggtacctgcccatagtgttctgcggacacactaagggcaataaaaactatgcactacactctgacgactacaccccccaaggacagccatttggaggggcccttagcactacctctttctccctaaaagtgttgtatgaccagcaccagaggggactaaacaagtggtcttttcccaacgaccagctagaccttgccagatacagaggctgcaaattctacttctatagaaccaaacagactgactgggtgggccagtatgacatatcagaaccctacaagctagacaagtacagctgccctaactaccacccgggaaacatgattaaggcaaagcacaaatttttaattccaagctatgatactaatcccagagggagacaaaaaattatagttaaaattccccccccagacctttttgtagacaagtggtacactcaggaagacctgtgtgacgttaatcttgtgtcatttgcggtttctgcggcttcctttctccacccattcggctcaccacaaactgacaacccttgctacaccttccaggtgttgaaagaattctactatcaggcaataggctttagtgcaacagaggaaaaaatacaaaatgtttttaacatattatacgaaaacaactcatactgggaatcaaacataactcccttttatgtaattaatgttaaaaaagggtctaacacagcacagtacatgtcacctcaaatttcagacgcagattttagaaataaagtaaatactaactacaactggtatacctacaatgccaaaacccataaagaaaaattaaaaacgctaagacaagcatactttaaacaattaacctctgaaggtccgcaacacacatcctctcacgcaggctacgccactcagtggaccacccccagcacagacgcctacgaataccacctaggcatgtttagtaccatctttctagccccagacagaccagtacctcgctttccctgcgcctaccaagatgtcacctacaatgccttaatggacaaaggggtgggcaaccacgtgtggtttcagtacaacacaaaggcagacactcaactaatactcaccggagggtcctgcaaagcacacatagaaaacatacccctgtgggcagccttctatggctacagcgacttcatagagtcagagctaggcccctttgtagacgcagagacagtaggccttatatgtgtaatctgcccctacactaaaccccccatgtacaacaagacaaatcccatgatggggtacgtgttttatgacagaaattttggtgacggcaaatggactgacggacggggcaaaatagagccctactggcaggttaggtggaggccagaaatgctttttcaagagactgtaatggcagacatagttcaaaccgggccctttagctacaaggacgaacttaaaaacagcacactagtgtgcaaatacaaattctatttcacctggggaggtaacgtgatgttccaacagacgatcaaaaacccatgcaagacggacgaacaacccaccgactccggtagacaccctagaggaatacaagtggcggacccggaacaaatgggaccccgttgggtgttccactcctttgactggcgaaggggctatcttagcgagaaagctctcaaacgcctgcaagaaaaacctcttgactatgacgaatattttacacaaccaaaaagacctagaatgtttcctccaacagaatcagcagaaggagagttccgagagcccgaaaaaggctcgtattcagaggaagaaaggtcgcaagcctctgccgaagagcagacgaaagaggcgacagtacttctccttaaacgacgactcagagagcaacagcagctccagcagcagctccaatttctcacccgagaaatgttcaaaacgcaagcgggtctccacctaaaccctatgttattaaaccagcggtga

SEQ ID NO: 183 - DNA, 456 bp, Torque teno virus
atgcgcttttccagaatctacaggccaaagaaagggccactgccactgcctctggtgcgagcagaacagaaaaaacagcctagtgatatgagttggcgccctccgcttcacaatggggcaggaatcgagcgtcagtttttcgaaggctgctttcgattccacgctagttgttgcggctgtggcaattttgttactcatattactctactggctgctcgctatggttttactggggggccgacgccgccaggtggtcctggggcgctaccctcgctaaggagagcgctgccacctcctccggccccccaagaccaggctgaaccagagctatggcgtggtcgtggtggtggaggcgaaggaaacgctggtggccgcgcagaaggaggcgatggagaaggctacgaacccgaagaactggaagagctgttccgcgccgccgccgccgacgacgagtaa

SEQ ID NO: 184 - DNA, 2229 bp, Torque teno virus
atggcgttccggtggtggtggtggagacgccgcccgcagcgacgatggacccggcgccgatggaggagactacgaacccgccgacctagacgcactgtacgacgccgtcgccgcagaccaagagtaaggagaaggcggtggggcaggagacgtgggcgacgcagactgtacagacgcacatatagaaaaaggcgcaaaagacgaaaaaaaatgaccttaaaaatgtggaatccatccacaattcgcgcctgtaacattaggggcttcatagcactagtagtctgtggacacactcgtgcaggctgtaactatgccatacacagcgaagactacatacctcaactaagaccctacggagggtctttcagcactactacttggagtctaaaactactatttgacgaatatctgaaatttagaaacaaatggagctaccccaacacagaactaaaccttgctagatacaggggagccacatttacattttacagagaccccaaagtagactatatagtagtatacaacacagtacctccatttaaacttaacaaatacagctgccccatgctgcacccaggtatgatgatgcagtacaaaaagaaagttttaataccaagctatcagacaaaaccaaagggaaaagccaaaataagacttagaataaaacctccagttttatttgaagacaaatggtacacccagcaagacctgtgtcccgttaatcttttgtcacttgcggttagcgcatgttccttcctgcatccgtttataccaccagaaagtgacaacatatgcataacgttccaggtgttgcgagacttttattacacacaaatgtcagttacacccacaacaaccacttccctaaatcagaaagatgaaaaaatatttagtgaccacttatataaaaaccctgaatactggcaatcacatcacacagctgctagactatctacctctcaaaaacctgcactacgaaataaagaagaaatacctaatgatcacggatacttaaacacaacaccaactgacagtacttttagaactggaaacaatacaatatatggccaaccaagctacagaccaaactataccaaactaactaagattagagaatggtactttacacaagaaaacacagacaacccaatacatggcagctacttaaaaccaacactaaactctgtagactaccacctaggaaaatacagtgctatattcttaagtccctatagaacaaacactcaatttgatacagcataccaagatgtaacctacaatcctaacacagacaaaggcaaaggcaataaaatatggattcagagctgtacaaaagaatccaccatactagacaacgcatgcagatgtgtaatagaagacatgccattatgggctatggtaaatggctacttagaattctgtgactcagagcttccaggagccaacatctacaatacatacatagtagttgttatatgcccttacaccaaacctcaactactaaacaaaactaatccaaaacaaggctatgtattttatgacactctatttggagacggaaaaatgcccacaggaacaggcctagtaccgttctggctgcagagcagatggtaccccagagcagagttccaacaacaagtactacatgacctttaccttacaggcccatttagctacaaagatgacctaaaatcctttagctttaatgctaaatacaaattctcattcttatggggcggcaatatgattccccaacagattatcaaaaacccgtgtaaaaaagaagaatccacattcacctatcccagtagagagcctcgcgacctacaagttgttgacccactcaccatgggcccagaatgggtcttccacacatgggactggagacgtggactttttggtaaaaatgctgtcgacagagtgtcaaaaaaaccagacgatgatgcagaatattatccagtaccaaaaaggcctcgattcttccctccaacagacacacagtcagagccagaaaaagacttcggtttcacaccggagagccaagagttacagcaagaagacttacgagcaccccaagaagaaagccaagaggtacagcagcagcgactgctccagctcagactctcacagcagttcagactcagacagcagctccagcacctgttcgtacaagtcctcaaaacccaagcaggtctccacataaacccattatttttaaaccatgcataa

SEQ ID NO: 185 - DNA, 2253 bp, Torque teno virus
atggcgtggacctggtggtggcagaggaggcgccgaaggtggccgtggagaaggagaaggtggagaagactacgcaccagaagacctagacgacttgttcgccgccgtcgcaagagatacagagtaaggagacggaggcggtggggaaggagacgtgggcgacgcacataccttagacgcagacttaaaaaaagaaagagacgcaaaaagctaagactgactcaatggaaccctagcacaattagaggatgtacaattaagggaatggctcccctaattatctgtggccacactatggcaggcaataactttgccatccgaatggaggactatgtctctcaaattagaccattcggagggtcgtttagcaccacaacctggagccttaaagtactttgggacgagcacaccagattccataacacctggagctacccaaacactcagctagatctcgcaaggtttaaaggagtaaacttttacttctacagagacaaagacacagactttatagtaacatacagctcagtcccgccatttaaaatggacaaatactcatcagccatgctacatccaggcacgctcatgcagagaaagaaaaagatattaatacccagctttacaacaagaccaaggggccgaaaaaaagttaaactgcatataaaacctcctgttttatttgaagacaaatggtacacccagcaggacctctgcgacgttaatcttttgtcacttgcggtttctgcggcttcctttagacatccgttctgcccaccacaaactgacaacatttgcatcactttccaggtgttgaaagacttctattacacacaaatgtcagttacaccggacacagcaggccaagaaaaagacattgaaatatttgaaaaacacttatttaaaaatccacaattctatcaaactgtccacacacaaggaataattagcaaaacacgaagaacagctaaattttcaacctcaaataataccctaggaagtgacacgaatataacgccatacctagaacaaccaacagcaacaaaccacaaaaacacattatccacaggtaacaactcaatatatggccttccatcttacaacccaataccagataaacttaaaaaaattcaagaatggttttggaaacaagaaactgacaaagaaaatttagttactggctcctatcaaacacctactaacaaatcagtaagctaccatctaggaaaatacagccccatatttttaagctcatatagaactaatctacagtttataactgcatacacagatgtaacatacaatcccctaaatgacaaaggaaaaggcaaccaaatatgggtacagtatgtaacaaaaccagatactatatttaatgaaagacagtgcaaatgccacatagtagatattcctttgtgggcagcattccatggctatattgactttatacaaagtgaactaggcatacaagaagaaatactaaacattgccataatagtagttatatgtccatacacaaaacccaaactagtacacgacccaccaaaccaaaaccaaggctttgtattctatgacacacaatttggagacggtaaaatgccagagggctcgggcctagtacccatatactaccaaaacagatggtatcctagaataaagttccagagtcaagtagtgcatgactttatactaacaggcccctttagctacaaagatgatctaaagagcacagtactaacagtagaatacaagtttaaattcttatggggcggcaatatgattcccgaacaggttatcagaaacccttgtaaaacagaaggacacgatctccctcacaccagtagactccatcgcgacttacaagttgttgacccacacaccgtgggcccccaatgggcgctccacacctgggactggcgacgtggactctttggttcagaggctatcaaaagagtgtctgaacaacaagtacatgatgaactgtattacccagcttcaaagaaacctcgattcctccctccaatatcaggcctccaagagcaagaaagagactacagttcgcaggaggaaaaagaccagtcctcctcagaagaagagaaggacccgaagaaaaaagagcaaaaacagcagcagcgactccacctccagttccaagagcagcagcgactcggaaaccaactccgactcatcttccgagagctacagaaaacccaagcgggtctccacataaatcctatgttatcaaaccggctataa

SEQ ID NO: 186 - DNA, 2268 bp, Torque teno virus
atggcctggagatggtggtggagacggcgctggaagccaagaaggcggccagcgtggaccaagtaccgcagacgcaggtggagacgacttcgaccccgcagacctagaagacttgctcgcggccgtcgaagaagacgaacagtaaggaggcggagggtcaggagactcagacggaggagggggtggactaggagacggtacttgagacgcagaaagagacgaaagctaatactgactcagtggaaccccaatattgtcagacgatgctctataaagggtataatccccctcacaatgtgcggcgctaacaccgccagttttaactatgggatgcacagcgacgacagcacccctcagccagagaaatttgggggaggcatgagcacagtgacctttagcctgtatgtactgtatgaccagttcactagacacatgaaccggtggtcttattccaacgaccagctagacctggccagatacaggggctgctcattcaaactgtacagaaaccccacaactgactttatagtgcagtatgacaataatcctcctatgaaaaacactatactgagctcacctaacactcacccaggtatgctcatgcagcagaaacacaggatactagtgcccagctggcagacctttcccagggggagaaaatatgttaaagttaagatacccccacctaaactctttgaggaccactggtacactcagccagacttatgcaaagttccgctcgttactctgcggtcaaccgcagctgacttcagacatccgttctgctcaccacaaacgaacaacccttgcaccaccttccaggtgttgcgagagaactataacgaagtcctaggacttccctatgctaacaccgggtctaacaatgaagtcaaaattaaaattgataactttgaaaactggctttataactccagtgtacactatcaaacattccaaacagagcaaatgttcagacccaaacaatacaatgcagatggctctacctggaaagactacaaaagcatgttatctacatggacatcacaaatatataacaagaaaacagacagcaactatgggtatgcctcctatgactttagtaaaggtaaagagtttgctacacaaatgagacagcattactgggtacaactaacacaactaacagccacagtcccacacataggacctacttacagcaacacaaccacaccagaatacgaatatcacgcaggctggtactctccagtgttcataggccccaacagacacaacatacagttcagaacagcatacatggacgttacctacaacccactaaatgacaaaggccagtttaacagagtatggttccagtacagcactaaacccaccacagacttcaacaacacacagtgcaaatgtgttctagaaaacattccactgtggtcagccctatttggatactctgaatatgtagagagccagctaggccccttccaggaccacgggaccgtgggtgtagtagtagtacaatgtccttacacagtgccacccatgtataacaaagagaaaccagacatgggctacgtattctatgacacacattttggcaatggcaaattgggcaacggcagcggccaggtacccaggtactggcagatgagatggtaccccatactcaaaagacaaaaacaagtaatgaatgacatttgcaagactggaccgttcagctacagagacgaactgcttcaggtggacttagcaagcccctacaccttcagatttaactgggggggcgacttactctaccaccaggtcatcaaagacccgtgcagctcctcaggactggcacctaccgactccagtagattcaagcgggatgtacaagtcgttagcccgctcacaatggggccccgactgctattccactcgttcgaccaaagacgagggttctttactccaggagctatcaaacgaatgcatgatgaacaaattaatgttccagactttacacaaaaacctaaaatcccgcgaattttcccaccagtcgagctccgagaaagagcagaagccgaagaagactcaggttcggaaaaagcgtcgttcacctcgtcgcaagagagagaagccgaagcccaagaaaagttaccgatacagctccagctcagacagcagctcagacaacaacagcagctccgagtccacttgcagcaagtcttcctccaactccaaaaaacgaaggcacatttacatataaacccactatttttggcccaagggaacatgtaa

SEQ ID NO: 187 - DNA, 2280 bp, Torque teno virus
atggcctactcctactggtggcgccgccggaggtggccgtggagaggccgatggaggcgctggaggcgccgcagacgaataccgcgccgaagacctagacgacctgttcgccgctatcgaaggagaccagtaaggagaaagcgtcggtgggggaggcgagggcgacggcgccggtacactagacggtacagacgcagactgactgtcagacgaaagagaaacaaactcagactgagcgtatggcagccccagaatatcagatactgtgccataaaaggcctctttcccatcctcatctgcgggcacggaaagagcgccggcaactatgccatccactcggatgactttatcacaagcagattctctttcggaggtggtctcagcacgacctcctactctctgaagctgctattcgaccaaaacctcaggggactaaacagatggaccgctagcaacgaccagctagacctagctaggtacctgggggccatattctggttctacagagaccagaaaacagactacatagtccagtatgacatctcagagcccttcaagatagacaaagacagctccccttccttccatccaggcatactgatgaaaagcaaacacaaagtactggtacccagcttccagacttggcccaagggtcgctctaaagtaaagctaaagataaagccccccaagatgttcgttgacaaatggtacacacaagaggatctctgtaccgttactcttgtgtcacttgtggtcagcctagcttcctttcaacatccgttctgccgaccactaactgacaacccttgcgtcaccttccaagttctgcaaaatttctacaacaacgtaataggctactcctcatcagacacactagtagataatgtctttacgagtctgttatactctaaagcctccttctggcagagccatctgaccccctcttatgtcaaaaaaattaacaacaaccccgatggcagctcaattagtcagcgagtaggcacaatgcctgacatgacggagtataacaagtgggtatccaacacaaatataggaacaggattcgtaaactcaaatgttagtgtacactataattattgtcagtacaaccctaaccatactcatttaacaacactgagacagtactacttcttttgggaaacacacccagcagcggccaacaaaacacctgtaacacacgtccccatcaccaccacaaaacccaccaaagactggtgggagtacagattaggcctgttcagtcccatcttcctatctccactcagaagcagcaacatagagtggcccttcgcatacagagacataatatacaacccactcatggacaagggggtaggtaacatgatgtggtaccagtacaacacaaaaccagatacccagttctcccccacctcttgcagagcagtgctagaagacaaacccatatggtccatggcatatgggtatgcagactttctgctgtccatactaggtgaacacgacgatgtagacttccatggattagtctgtatcatatgcccctacaccagaccgcccctcttcgacaaggataaccccaagatgggctatgtcttctacgatgctaaatttggcaatggcaaatggatagacggtacgggattcatcccggtagagttccagagtagatggaaaccagagctggccttccggaaagacgtactgactgacttagccatgtcaggccccttctcctacagcgacgaccttaaaaacaccacaatccaggccaagtacaaattcaaattcaaatggggcggtaatctctcttaccaccagacgatcagaaacccgtgcacctcggacggacagacgcccacaaccagtagacagtctagagaggtacaaatcgttgacccgctcaccatgggaccccgatacgtattccactcgtgggactggcgacgtgggtggcttaatgacagaactctcaaacgcttgttccaaaaaccgctcgattttgaagagtatccaaaatctccaaagagacctagaattttcccacccacagagcagctccaagaagacccgcaagagcaagaaagagactcctcttcttcggaagaaagtctccctacatcgtcagaagagacaccgccagcccacctactcagagtacacctcagaaagcagctccggcaacagcgagacctccgagtccagctcagagccctgttcgcccaagtcctcaaaacgcaagcgggcctacacataaaccccctcttattggccccgcagtaa

SEQ ID NO: 188 - DNA, 2220 bp, Torque teno virus
acggcctggtggtggggaagacggtggcgacgccgcccgtggggccgctggcgccgccgaaggcgcgtatggagaagaagacctagaactgctgttcgccgccgccgaggaagacgatatgtgagtagaaggcgccgctacaggcgcagactcagacgaaggggcagacggagatacagggggcgacgaaagaagagacagaccctagtactcaaacaatggcaacccgacgttaacagactgtgcagaatcacaggatggctacctcttatagtttgtggcaccggcagggcccaggacaactttatagtacactcagaggacataaccccccgaggagccgcctacgggggcaacctcacacacataacatggtgcttagaagctatataccaagaattcctcatgcacagaaacagatggtccagaagtaaccatgacctggacctctgcagataccaaggagtagtttttaaggcctatagacaccccaaagttgactacatactagcatacacaagaacacctccatttcaagcaacagaacttagctacatgtcctgccatccactactcatgctgacagcaaaacacaggatagtagtaaagagccaagagaccaaaaaagggggcaaaaaatatgtaaaatttagaataaagccccccagactaatgttaaacaagtggtacttcactcatgacttttgtaaagtcccactattcagcatgtgggcctcagcctgtgatctaagaaatccctggctaagagagggagccctaagccccacagtaggcttttttgccttaaagcctgacttctaccctaatttaagcattttaccaaatgaagtcagtcaacaattcgacttctttttaaactctgctcacccaccaagcatacaatcagaaaaagatgttagatgggaatatacatacacaaacttaatgaggcctatatacaaccagaccccatcactaaaggcctccacatatgactggcaaaactatagcaatccaaacaactatcaagcatgccaccaacaattcatagcatttaaagcacaaagatttgccaaaattaaagcagaatatcaaacagtatatcctacactaacaacacagacaccccaatcagaagcactaacacaagaatttggactatactctccatactatttaacaccaacaagaatcagcctagactggcacacagtattccaccacatcagatacaacccgatggcagacaaaggcctaggaaacatgatttgggtcgactggtgttccagaaaagaagccacctacgaccccacaagatccaagtgcatgctaaaagacctaccactatacatgcgcttctatggctactgtgactgggtaactaaatcaataggctcagaaacagcctggagagacatgagattaatggtggtctgcccttatacagaaccccaactaatgaaaaaaaatgacaaaacctggggctatgtaatctatggctacaactttgcaaacggaaacatgccgtggttacagccatatatcccaatctcgtggttttgccgttggttcccttgcatcactcaccaacgtgaagcaatggagtcagttgtggccacaggaccgttcatggtcagagaccaagaccgcaacagttgggacataactataggctacaaattcttatggagatgggggggctctcctctgcccactcaggcaatcgacgacccctgccagcagggaacccacccgcttcccgagcccggtacgttgcctagaatcttacaagtcagcgacccgacgcaactcggaccgaaaaccatattccacctctgggaccagaggcgtggactttttagcaaaagaagtattgaaagaatgtcagaatacaaaggaactgatgacttattttcaccaggtcgcccaaagcgcccaaagctcgacacacgtcccgaaggactaccagaggagcaaagaggagcttacaatttactccaagccctcgaagactcagcccagtcggaagaaagcgaccaagaagaaatgcctcccctcgaagaagaacaagtactccacgagcaaaagaaagaggcgctcctccagcagctccagcagcagaaacaccaccagcgagtcctcaagcgaggcctcagactcctcctcggagacgtcctgaaactccgccggggtctacacatagacccggtccttacatag

SEQ ID NO: 189 - DNA, 2043 bp, Torque teno virus
acggcgtggtggtggggacggtggcgccgccgctggcgccgcaggcgaccgtggagaccgagactacgacgaagaagagctagacgagcttttccgcgccgccgccgaagacgatttgtaagtaggagatggcgccggccttacaggcgcaggaggagacgcgggcgacgcagacgcagacgcagacgcagacataagcccaccctagtactcagacagtggcaacctgacgttatcagacactgtaagataacaggacggatgcccctcattatctgtggaaaggggtccacccagttcaactacatcacccacgcggacgacatcacccccaggggagcctcctacgggggcaacttcacaaacatgactttctccctggaggcaatatacgaacagtttctgtaccacagaaacaggtggtcagcctccaaccacgacctcgaactctgcagatacaagggtaccaccctaaaactgtacaggcacccagatgtagactacatagtcacctacagcagaacgggaccctttgagatcagccacatgacctacctcagcactcacccccttctcatgctgctaaacaaacaccacatagtggtgcccagcctaaagactaagcccaggggcagaaaggccataaaagtcagaataagaccccccaaactcatgaacaacaagtggtacttcaccagagacttctgtaacataggcctcttccagctctgggccacaggcttagaactcagaaacccctggctcagaatgagcaccctgagcccctgcataggcttcaatgtccttaaaaacagcatttacacaaacctcagcaacctacctcagcacagagaagacagacttaacattattaacaacacattacacccacatgacataacaggaccaaacaataaaaaatggcagtacacatataccaaactcatggcccccatttactattcagcaaacagggccagcacctatgacttactacgagagtatggcctctacagtccatactacctaaaccccacaaggataaaccttgactggatgaccccctacacacacgtcaggtacaatccactagtagacaagggcttcggaaacagaatatacatacagtggtgctcagaggcagatgtaagctacaacaggactaaatccaagtgtctcttacaagacatgcccctgtttttcatgtgctatggctacatagactgggcaattaaaaacacaggggtctcctcactagcgagagacgccagaatctgcatcaggtgtccctacacagagccacagctggtgggctccacagaagacatagggttcgtacccatcacagagaccttcatgaggggcgacatgccggtacttgcaccatacataccgttgagctggttttgcaagtggtatcccaacatagctcaccagaaggaagtacttgaggcaatcatttcctgcagccccttcatgccccgtgaccagggcatgaacggttgggatattacaataggttacaaaatggacttcttatggggcggttcccctctcccctcacagccaatcgacgacccctgccagcagggaacccacccgattcccgaccccgataagcaccctcgcctcctacaagtgtcgaacccgaaactgctcggaccgaggacagtgttccacaagtgggacatcagacgtgggcagtttagcaaaagaagtattaaaagagtgtcagaatactcatcggatgatgaatctcttgcgccaggtctcccatcaaagcgaaacaagctcgactcggccttcagaggagaaaacccagagcaaaaagaatgctattctctcctcaaagcactcgaggaagaagagaccccagaagaagaagaaccagcaccccaagaaaaagcccagaaagaggagctactccaccagctccagctccagagacgccaccagcgagtcctcagacgagggctcaagctcgtctttacagacatcctccgactccgccagggagtccactggaaccccgagctcacatag

SEQ ID NO: 190 - DNA, 2241 bp, Torque teno virus
acggcgtggtggagatacagacggagaccgtggagaagatggaggagacgccgctggggcctacgaacccgaagacctagaagaacttttcgccgccgccgagcaagacgatatgtgagtagagggcggcgccgccgatacaggcgcagacgcagacgggggcgacgcagacggggacgcagacgcaggcacagaaagactctcattgtcaggcaatggcaaccagacgttataaagagatgctttatcacagggtggctgcccctcattatctgtggaaacggacacacccaatttaactttataactcacatggatgacattccacccaagaatgcatcctacgggggcaacttcaccaacttgacctttaacctagcctgcttctatgacgaattcatgcaccacagaaacagatggtcagcctctaaccatgacctagagctagtgagatacatcagaaccagccttaaactctacagacacgagtcagtagactatatagtgtgctacaccaccacaggccccttcgagacaaatgaaatgtcctacatgctcactcaccctctggccatgctcctcagcaaaagacacgtagttgtgcctagcctaaaaacaaaaccacacggcagaaagtacaaaaagataacaattaagcccccaaaactgatgctaaacaagtggtactttgctacagacctctgccacataggcctcttccagctctgggccacaggcctagagcttagaaatccatggctcagatcaggcacaaacagccctgttataggcttctatgtccttaaaaaccaagtttacaaaaacagatacagcaacctaaacacaacagaagcacacaacgccagacaagacgcatggaacgaactaacccaaacaaaaactaacgacaaatggtacaattggcaatatacatacaataaacttatgaagccaatttactatgcagcttcaaatgaaagtagtaattcagccatgaaaggaaaaacatataattggaaacattacaaagaatattttagcaacacacaaactaagtggaaaacaattattaaagacgcctatgacttagtaagagaggaataccaacaattatacaccacaactatggcatatccaccaccatggcaatcaaccacttctaatacaggcagacaatacctagaacatgactgtggcatttacagcccatactttctaacaccacaaatatatagcccagaatggcacacagcctggtcctacatcagatacaatcccctcacagacaaaggcataggaaacagagtctgtgtccagtactgcagcgaggccagcagcgactacaacccaataaagagcaagtgtatgttacaagacatgcccttgtggatgatgctgtatggctacgcagactatgtagtaaagagcacaggcatacagtcagcctggacagacatgagagtggccatcagatgtccctacacagaccctaagcttgtgggcagcacagaaaacaccatgtttatccccataggcctagaattcatgaacggagacattccagacaaaaggccctacattccgttaacctggtggtttaagtggtaccccatgattacacaccagaaaaccgcaattgaggcaatagtttcctgcagccccttcatgcccagagatcaggaacaagctagttgggacataactgtaggttacaaagcaaccttcttatggggcgggtccccgttacctccacagcccattgacgacccctgccaaaaaggaaaacacgacattcccgaccccgatacaaaccctccaagaatacaaatatcagacccgcaacacctcggaccggcgacgctgttccactcgtgggacctcagacgtggatatattaatacaaaaagtattaaaagaatctcagaacacctcgatgctaatgaatatttttcgacaggcgtcgtgtccaaaaaaccccgattcgacactccccaccacgggcagctatcaaaccaagaagaagacgccttgtctatcctcagacaaccccaaaaagagcaagaagagaccacctccgaggaagaacaagcactccaaaaagaagaggagcaaaaagaaaagctcctacagcaactcagagtccagcgacagcaccagcgagtcctcagacagggaatcaaacacctcatgggagacgtcctccgactcagacagggagtccactggaacccagtcctataa

SEQ ID NO: 191 - DNA, 2217 bp, Torque teno virus
acggcctggggatggtaccggagaagaagatggcgcccatggagaaggagaaggtgggcgatacgcagaagaagacctagaagaactgttcgccgccgcggcagaagacgatatgtgagtagatggccgcgccgccgatacaggcgcagacgcagacgaaccagacgtagggggggacgcaaaaggagacacagacagactcttatactcagacagtggcaaccagatgttatgaaaaaatgttttattactggctggatgcccctcattatatgtggcactgggaacactcaatttaactttataacccatgaagacgatgtgccaccaaaaggagcctcctatggaggcaacctcactaacctcaccttcactctagaaggactgtatgacgaacacctactccacagaaacaggtggtccagatcaaactttgatctagacctcagcagatacctctacactataataaagctatacagacacgagtctgtagactacatagtcacctacaacagaacaggcccctttgaaataagcccactcagctacatgaacacacaccctatgctaatgctcctaaacaagcaccacgtagtggtgccaagcccaaaaacaaagcccaaaggcaagagggccattaaaattaaaataaagccacctaaactaatgctaaacaaatggtactttgcaagagacacgtgtagaataggcctctttcagctctatgccacaggggctaacctaacaaacccctggctcaggtcaggcacaaacagccctgtagtgggattctatgtaattaaaaactccatatatcaagacgcctttgataacctggcagacacagaacatacaaaccaaagaaaaaatgtatttgaaaacaaactatatcccactacaacaactaacaaagacaactggcaatacacatacacatccctcatgaaaaacatatactttaaaacaaaacaagaagcagaaaaccaaacaatgagtagcacatacaactttgacacatacaaaacaaactatgacaaagtaagaactaaatggataaaaatagctgaagatggctataaactagtatcaaaagaatacaaagaaatatacatcagtacagccacataccctccacaatggaattcaagaaactaccttagccatgactatggcatttatagtccttactttttaacaccccaaagatacagcccccaatggcacacagcatggacatatgtcagatacaacccactaacagacaaaggcataggcaacagaatatttgttcagtggtgctcagaaaaaaacagctcatacaacagcacaaaaagcaagtgcatgctacaagacatgcccctttttatgctaacctatgggtacctagactatgtactaaaatgcgcaggctctaaatcagcctggacagacatgagagtctgtatcagaagcccatacacagaaccacagcttacaggcaacacagatgatattagttttgttataatatcagaggccttcatgaacggggacatgccctacctagctccacacatacccgttagtctgtggtttaagtggtaccccatgatattacaccagaaggcagctttagaaaccatagtttcctgtggaccgtttatgcccagagaccaggaagccaactcttgggacataaccgcaggttacaaagcagtttttaagtggggtgggtcccctctgcctccacagcctatcgacgacccctaccaaaaacccacccacgaaatacccgaccccgataagcaccctccaagactacaaattgcagacccgaaaatcctcggaccgtcgacagtcttccacacatgggacatcagacgtggcctctttagcacagcaagtcttaagagagtgtcagaataccaaccgcctgatgaccttttttcaacaggcgtcgcatccaaaagaccccgattcgacactccagtccaagggcagctcgaaagccaagaagaagaaagctatcgtttactcagagcactccaaaaagagcaagagacaagcagctcggaagaggagcagccacaaaaccaagagatccaagaaaaactactcctccagctccagcagcagcgacaacagcagcgactcctcgcaaagggaatcaagcacctcctcggagatgtcctccgactccgaaaaggagtccactgggacccggtccttacatag

SEQ ID NO: 192 - DNA, 2217 bp, Torque teno virus
acggcgtggtacagaagaagaaggtggagaccgtggagaagacgccgcagaccgtggaccctacgcagaagaagagctagaagatttgttcgccgccgcccgagaagacgatatgtgagtagatggcggcgccgccgatacaggcgcagactaagacgggggagacgacgaaggggacgcagacgcagaaaagaaactataatagtgagacagtggcagccagatgtaatgagaaactgttatattactggcttcctacctctcatagtctgtggctcaggcaacactcaatttaactttatcacacatgagaatgacatacccccaaggggagcctcctatgggggcaacctcaccaacataaccttcaccctagcggcactatatgaccagtacttgctacacagaaacaggtggtccaggtcaaactttgacctagacctagccagatacattaacacaaaactaaaactatacagacatgactcagtagactacatagtaacctacaacagaacaggtccctttgaggtgaatccactaacatacatgcacactcaccccctactcatgctcgtgaacaggcaccacatagtggtgcccagtttaaaaacaaaacccagaggcaaaagatacataaaagtaaaaataaagcctccaaaactaatgctaaacaagtggtactttgcgaaagacatctgcccactaggcctcttccagctatatgctaccggcctagaactcagaaacccctggatcagagagggcacaaacagccccatagtagggttttatgttttaaaaccctcactatataatggagccatgtcaaacttagcagacacagaacatttaaaccaaagacaaaccctatttaacaaactacttccaacacaaaaccaaaaagacgaatggcaatacacatacaacaaaccaatgcaaaaaatatattatgaagcagcaaacaagcaagatagtggctttaaaaatacaacatataactggacaaactacaaaactaactaccaaaaagtacaatcacaatggcaaactgtagcacaacaaaactacaaccaagtatacaatgaatttaaagaggtatacccactaacagctacatggccaccgcaatggaatgctagacaatacatgtcacacgactttggcatatacagcccatactttttgtcacctgcaagatttacagactactggcacagtgcatacacctatgtcagatacaaccccatgtcagacaaaggcataggtaacataatctgcatacaatggtgcagtgaaaaaaacagtgaatttaatgagactaaaaacaagtgcatactaagagacatgccactttacatgctaacatatggctacctagactataccacaaaatgcacaggctccaactccatctggacagacgccagagtagccatcagatgtccatacacagatcccccactatcaaatccaactaacaaaaacacactttatattccactatctacatctttcatgcaaggagacatgccctggccaaccacaaacattccgttaaagatgtggtttaagtggtatcccatgatcatgcaccagagggcctgtttagaaaccatagtttcctgtggaccgtttatgcccagagaccaaaccgcaagcagttgggacataactattgcatacagagccttttttaaatggggtggcaatcctctgcctccacagcccatcgacgacccctgccaaaaagacacccacgaaatacccgaccccgataaacaccctagaggaatacaaatatcagacccgaaggtactcggaccacccacagtcttccacacatgggacatcagacgtggactgtttagctcgacgagtcttaaaagagtgtcagaataccaaccgcctgatgaccctttttcaacaggcgtcgtcttcaaaagaccccgactggaaacccagtacaaaggaacccaagaaaccccagaagaagacgcctacactttactcaaagcactccaaaaagagcaagagagcagcagctcggaagaagaactcccacaagaagagcaagagatccaaaaaacacaactcctcaagcagctccaactccagcagcagcaacagcgaatcctcaagaggggaatcagacacctcttcggagacgtcctccgactcagaaaaggagtccactccaacccagacctattataa

SEQ ID NO: 193 - DNA, 2217 bp, Torque teno virus
acggcctggtaccggtacagaagaaggccatggcgccgaaggaggcgaccgaggtggggcctacgcagaagaagatttagaagatcttttcgcggccgcggaagaagacgatatgtgagtagatggtcgcgccgccgatacaggcgcagacggagaagggggcgacgtagacggggacgcagacgaagaaagagacagactcttataccgagacagtggcagccagatgttactaaaaagtgcttcattactggctggatgcccttaataatctgtgggactggacacacacaatttaactttataacccacgaagaggatatccccggtgcaggagcctcctatggaggaaaccttacaaacattaccattactctgggagggctatatgaacaatatatgcttcacagaaaccactggtccagaagcaactatgacctagagctggccagatacctaggcttcaccctaaaatgctacagacatgcaacagtagactatatacttacatacagcagaacaacaccctttgagaccaatgaactgagccacatgctaactcaccccttactaatgctactaaacaaacatcacagagtaatacccagcttaaaaacaaggccaaaaggaaaaaggtcagttagaatccacattaaacccccaaaactaatgataaacaaatggtactttgcaaaagacctctgtaacataggaccctgtcaaatatatgccacaggcctagaactctcaaacccctggctaagatcaggcacaaacagccctgtaataggcttttgggtacttaaaaatcacctatatgatggcaacctctcaaacatagcctcaggtgaacaattaacagccagacaaactctatttacaactaaattactcccaagtaataacaccaaagacgaatggcaatacgcctataccccactaatgaaaacattctacacacaagcagccaacacagcagcacataacataacagacaaaacatacaactggaaaaactacaaaactcactatgacaaagtacaacaaacatggacaacaaaagcacaatttaattatgacttagttaaagaagaatacaaaacggtatatccaaccacagctacattcccaccagagtggtcaaacagacaatatctagaacatgactatggcttattcagcccttattttctaacaccaaacagatacagcacagagtggcacatgccaattacctatgttagatacaacccactagcagacaaaggcataggcaacagaatatacatgcagtggtgctcagaaagcagcagcagctttgagcccaccaaaagcaagtgcatgctacaagacatgccactatacatgctcacatatggatacctagactatgttgttaaatgcacaggtgttaaatcagcctggacagacatgagagtggccattagaagcccctacacctttcctcaactaataggcagcacagataaagtgggcttcatccccctaggtgaaaaattcatgagcggagacacagaccccgttaaaaactttataccgttaaagtattggtacagatggtatccgtttgcggctaaccaaaagtcagttttagaaaccatagtttcctgtggccccttcatgcccagagatcaggaagcaggctcttgggacataactgtaggttacaaagcaacctttaaacgggggggctcccctctacctccacagcccatcgacgacccatgccaaaagcccacccacgaccttcccgaccccgatagacaccccccaagaatacaaatctcggacccggcaagactcggaccggagacgctcttccactcatgggacatcagacgtggatacattaacacaaaagctattaaaagaatctcagattacacagaatctaatgactatttttcaacaggcgtcgtgtcaaaaagaccccgattggaaacccagtaccacggccaacacgaaagccaagaagaagacgcctatcttttactcaaacaactccaggaagagcaagaaacgagcagttcggagggagaacaagcaccccaagaaaaaacactccaaaaagaaaagctcctcaagcagctgcagctccacaagcagcagcagcaactcctcagaaaaggaatcagacacctcctcggggacgtcctccgactcagacggggagtccactgggacccaggcctatag

SEQ ID NO: 194 - DNA, 2211 bp, Torque teno virus
acggcgtggtggtggggccgatggagacagcgccgctggggccgccgccgccgcagaccatggagggtacgacgaaggagacctagaagatcttttcgccgccgccgccgaggacgatatgtgagtaggcggaggcgccgccgctactacaggcgcagactaagacggggcagacgcagagggcgacgaaagagacacagaccgaccctaatactgaggcagtggcaacctgacgttgttaaacactgtaagataacaggatggatgcccctcattatctgtggctctggcagcacacagatgaactttataacccacatggacgatactcctcccatgggatacacctacgggggcaactttgtaaatgtgactttcagcttagaggccatctatgaacagttcctatatcacagaaacagatggtccagatctaaccatgacttagacctagccaggtaccaaggaaccaccttaaaactctacagacacgccacagtagactacatactttcctacaacaggacaggacccttccagatcagtgagatgacatacatgagcactcacccagcaataatgctactaatgaaacacagaatagttgtgcccagccttagaacaaagcctaaaggcaggcgctccataaaaattagaataaagccccccaaacttatgctaaacaagtggtactttaccaaagacatatgctccatgggcctcttccaactaatggccaccggagcagaactcactaacccctggctcagagacaccacaaaaagcccagtaataggcttcagagttctaaaaaacagtgtttacaccaacttatctaacctaaaagacgtatccatatcaggagaaagaaaatccatcttaaacaaaattcacccagaaactctcacaggatcaggcaatgcatctaaagggtgggaatactcatacacaaaactaatggcgcccatatactattcagcagttagaaacagcacatacaactggcaaaactaccaaacacactgcgcaacaacagctatcaaatttaaagaaaaacaaaccagtactctaactcttattaaagcagagtacttataccactacccaaacaatgtcacacaggtagacttcatagatgaccccacactcacacatgactttggcatatacagcccatactggataacacctaccagaataagcctagactgggacacaccatggacatatgtcagatacaacccactctcagacaaaggcataggcaacagaatctatgcacagtggtgctcagaaaaaagcagcaaattagacaccacaaagagcaaatgcatactaaaagactttccactatggtgcatggcctatggctactgtgactgggtagtaaaatgtacaggagtgtccagtgcatggacagacatgagagtagccatcatctgcccgtacacagaaccggcacttatagggtcagatgaaaatgtaggctttattccagtaagtgacaccttttgcaacggagacatgccgtttcttgcaccatacatccctattacatggtggatcaagtggtaccccatgattacacaccaaaaggaagttcttgaggcaatagtaaactgtggaccgtttgtcccccgagaccaaagttccccagcttgggaaatcaccatgggttacaaaatggattggaaatggggcggctctcccctgccttcacaggcaatcgacgacccctgccagaagcccacccatgagctacccgatcccgatagacaccctcgcatgttacaagtctctgacccgacaaagctcggaccgaagacagtgttccacaaatgggactggagacgtgggcaacttagcaaaagaagtattaaaagagtccaagaagactcaacggatgatgaatatgttacagggcctttatcaagaaaaagaaacaagctcgacacaaagatgccaggccccccaacccccgaaaaagaaagctacactttactccaagccctccaagagtcgggccaggagagcagctcccaggacgaagaacaagcaccccaaaaagaagagaaccagaaagaagcgctcgtggagcagctccagctccagaaacagcaccagcgagtcctcaagcgaggcctcaaactcctcttgggagacgtcctccgactccgccgcggagtccactgggaccccctcctatcctaa

SEQ ID NO: 195 - DNA, 2232 bp, Torque teno virus
atggcatggggatggtggaaacgaaagcggcgctggtggtggagaaagcggtggacccgtggccgacttcgcagacgatggcctagacgatctcgtcgccgccctcgacgaagaagagtaaggaggcggaggaggtggaggagagggcgaccgagacgcagactgtacagacgcgggagacggtacagacgaaaacggaagagggctaagataactataagacaatggcagccagccatgacgagacgctgttttataaggggacacatgcccgctttaatatgtggctggggggcgtacgccagcaactacaccagccacctggaggacaaaatagttaaaggaccctacggagggggacacgccacttttagattctccctacaagtactgtgcgaggagcatctaaaacaccacaattactggactagaagtaaccaagacctagaactagctctgtactacggagccactattaaattttacagaagcccagacacagactttatagtaacataccagagaaaatccccccttggaggcaacatactaacagctccttcactacacccagcagaggccatgctaagcaaaaacaaaatactaataccgagcttacaaacaaaacccaaaggaaaaaagactgtaaaagttaacataccaccccccaccctttttgtacataagtggtactttcagaaggacatatgtgacctaacactgtttaacttgaacgttgttgcggctgacttgcggtttccgttctgctcaccacaaactgacaacgtttgcatcaccttccaggtactagccgcagagtacaacaacttcctctctacaactttaggcactacaaatgaatccacttttatagaaaactttttaaaagttgcatttccagatgacaaacctaggcattcaaacattttaaacacatttagaacagaaggatgcatgtctcacccccaactacaaaaatttaaaccaccaaacacaggaccaggcgaaaacaaatacttttttacaccagacggactatggggagaccccatatacatatacaataacggagtacaacaacaaactgcacaacaaattagagaaaaaattaaaaaaaacatggaaaattactatgccaaaatagtagaagaaaacacaataataacaaaaggatcaaaagcacactgccatctaacaggcatattttcaccaccattcttaaacataggtagagtagccagagaatttccaggactatacacagacgttgtctataatccatggacagataaaggcaaaggaaacaaaatatggttagacagcctaacaaaaagcgacaatatatatgacccaagacaaagcattctactaatggcagacatgccactatacataatgttaaatggatatatagactgggcaaaaaaagaaagaaacaactggggcttagctacacaatacagactactactaacatgtccctacacattcccaagactatacgtagaaacaaacccaaactatggatatgtaccatattcagaatcatttggagcaggccaaatgccagacaaaaacccctacgtaccaattacatggagaggcaaatggtaccctcacatacttcatcaagaggcagttataaatgacatagtaatatcaggcccattcacaccaaaagacacaaaaccagtaatgcaattaaacatgaaatactcgtttagattcacatggggcggcaatcctatttccacacagattgttaaagacccctgcacccagcccacctttgaaatacccggtggcggtaacatccctcgcagaatacaagtcatcaatccgaaagtcctcggacccagctacagtttcagatcctttgacctcagacgtgacatgtttagcggctcgagtcttaaaagagtctcagaacaacaagagacttctgagtttttattctccggcggcaaacgccccaggatcgaccttcccaagtacgtcccgccagaagaagacttcaatatccaagagagacaacaaagagaacagagaccgtggacgagcgaaagcgagagcgaagcagaagcccaagaagagacgcaggcgggctcggtccgagagcagctccagcagcagctccaagagcagtttcaactccgaagagggctcaagtgcctcttcgagcagttagtcagaacccaacagggagtccacgtagatccctgcctcgtgtag

SEQ ID NO: 196 - DNA, 2181 bp, Torque teno virus
atggcatggggatggtggaagcgacggcggcgctggtggttccggaagcggtggacccgtggcagacttcgcagacgatggcctcgatcagctcgtcgccgccctagacgacgaagagtaaggagacgcagacgatggaggagggggcgacctagacgcagactgtaccgacgctacagacgcaaaaaacgtaggagacgaaagcccaaaacagttttaaaacaatggcagccagacattacaaagaggtgctacataataggctacattcctgccataatatgcggggcgggcacctggtctcacaactacaccagccacctgctagatattatccccaagggaccgtttggagggggacacagcaccatgagattctccctaaaagtgctcttcgaagagcacctgagacacctaaacttttggacacgtagtaaccaggatttagaacttgtaagatactttagatgctcctttaggttctacagagaccaacacacagactatcttgtacactacagcagaaaaacacccctgggaggcaacagactgacagcacctagccttcacccaggggtacagatgctaagcaaaaacaaaataatagtacccagctatgatactaaacctaagggcaaaagctatgtaaaagtaactatagcaccccccactctactaactgacaagtggtactttagcaaagacatttgtgacacaaccttggttaacttagacgttgtactctgcaacttgcggtttccgttctgctcaccacaaactgacaacccttgcatcacgttttccgttcttcactccatctacaacgacttcctctctatagtagatactggaaactataaaacacaatttgtgtcaaacttatctacaaaagtaggtactgactggggaaaaagactaaacacatttagaacagaaggctgctactctcaccctaaattacccaaaaaggcagtaacacctggaaatgacaaaacatactttactgtacccgatggcttatggggagacgctgtatttaatgcagaggcaagcaatataattactaaaaacatggagtcatacagcgagtctgcaaaagccagaggagtgcaaggagaccctgcattttgccaccttacaggcatatactcacctccctggctaacaccaggtagaatatccccggagactccaggactttacacagacgtgacttacaacccatacgcagacaaaggagtgggtaacagaatatgggttgactactgcagtaaaaaaggcaataaatatgacaatacaagtaaatgccttttagaagacatgccactatggatggtcacctttggctatgtagactgggtaaaaaaagaaactggcaactggggtattccactgtgggccagagtactgataagatgcccttacacagtaccaaaactttacaatgaagcagacccaaactacggatgggtcccttactcctactactttggagaaggaaaaatgccaaacggagacctgtacgtaccctttaaaattagaatgaagtggtacccgtccatgtggaaccaagaaccagtactaaatgacttagcaaagagcggaccgtttgcatacaaagacacaaaaaccagtgtgactgtgactgctaaatacaaatttacatttaacttcgggggcaaccccgtaccctcacagattgtacaagatccctgcacacagtccacctatgacatccccggcaccggtaacttgcctcgcagaatacaagtcattgacccgaaagtcctcggtccccactactcattccaccgctgggacttcaggcgtggcctctttggccaacaagctattaagagagtgtcagaacaaccaacaacttctgagtttttattctcaggtccaaagagacccagaatcgatcaagggccttacatcccgccagaaaaaggctcagattcactccaaagagaatcgagaccgtggagcaactcggagaccgaggcagagacagaagccccctcggaagaagagccggagaaccaagaagaacaagtactccagttgcagctccgacagcagctccgagaacagcgaaaactcagacagggaatccagtgcctcttcgagcaactgataacaacccaacagggggttcacaaaaacccattgctagagtag

SEQ ID NO: 197 - DNA, 2244 bp, Torque teno virus
atggcgtggtcgtggtggtggaggcgacggaaacgctggtggccgcgcagaaggaggcgatggaggagatttcgcacccgaagagctagacgagctgttccgcgccgtcgccgccgacgaagagtaaggaggcgccggtgggggaggcgaagacgtaggagacgggttttttataagagacgcagacgaaagactggcagactgtacagaaagcccaaaaagaaactagtactgactcagtggcaccccactaccgtccgcaactgctccatccgaggccttgtgcctctagtactctgcggacacactcagggcggcagaaactttgctctcaggagcgatgactaccccaagcaggggtctccttacggaggcagttttagcactacaacctggaacttgagggtcctttttgacgaacaccaaaaacaccacaacacgtggagctaccccaataaccagctagacctgggcagatacaagggctgcaccttctacttttacagagacaaaaagacagactacatagtaaagtttcagaggaggggaccctttaaaataaacaagtacagcagtcccatggcccatccgggcatgatgatgctagataagatgaaaatcctggtgcccagctttgataccaggcccgggggtcgcagaagagtaaaagtaactatccgcccccccactctgttagaggacaagtggtacacccagcaagacctggcgcccgttaatcttgtgtcacttgtggtttctgcggctagcttcatacatccgtttagccaaccacaaacgaacaacatttgcacaaccttccaggtgttgaaagacatgtactatgactgcataggaattaattccactttaacaaccaagtatgaaaacttatttaataaactatattccaaatgctgctactttgaaacctttcaaacaatagcccagctaaatcctggctttaaagctgctaaaaagactactaatggttctggttctacagctgcaacactaggagacgcagtaactgaacttaaaaacccaaatggtactttttacacaggcaacaatagcacctttggctgctgcacatataaacccactaaagaaataggtagtaatgccaataagtggttctggcatcagttaacagccacagattcagacacactaggccaatacggccgtgcctccattaagtatatggagtaccacacaggcatttacagctcaatttttcttagcccactaagaagcaatctagaattccctacagcataccaagatgtaacatataatccactaactgacagaggtataggtaacagaatctggtaccagtacagtaccaaagaaaacactacatttaatgaaacacagtgcaaatgtgtactatcagacttgccactgtggagcatgttttatggctatgtagattttatagagtcagaactaggcatctcagcagagatacacaactttggcatagtatgtgtccagtgcccctacacgtttcccccaatgtttgacaaatccaaaccagataaaggctacgtgttctatgacaccctttttggcaacggaaagatgccagacgggagcggacacgtacccacctactggcagcagaggtggtggcccagattcagcttccagagacaagtgatgcacgacattatcctcaccgggcccttcagctacaaagatgactctgtaatgactggcataaccgcaggctacaagtttaaattctcatggggcggtgatatggtctccgaacaggtcattaaaaacccagagagaggggacggacgagactccacctatcccgatagacagcgccgcgacttacaagttgttgacccacgctccatgggcccccaatgggtattccacacctttgactacagacgggggctttttggaaaggacgctattaagcgagtgtcagaaaaaccgacagatcctgactactttacaacaccttacaaaaaaccaagatttttccctccaacagcaggagaagaaaaactgcaagaagaagactccgctttacaggagaaaagaagcccgctctcgtcagaagaggggcagacgagggcgcaagtcctccagcagcaggtcctccagtcggagctccagcagcagcaggagctcggggagcagctcagattcctcctcagggaaatgttcaaaacccaagcgggcatacacatgaacccccgcgcatttcaggagctgtaa

SEQ ID NO: 198 - DNA, 2244 bp, Torque teno virus; identical to SEQ ID NO: 197

SEQ ID NO: 199 - DNA, 2238 bp, Torque teno virus
atggcatggggatggtggagatggcggcgccgctggcccgccagacgctggaggagacgccgtcgccggcgccccgtacggagaacaagagctcgccgacctgctcgacgctatagaagacgacgaacagtaagaaccaggcggaggcggtgggggcgcagacggtacagacggggctggagacgcaggacttatgtgaggaaggggcgacacagaaaaaagaaaaagagactcatactgagacagtggcagcccgccaccagacgcagatgcaccataacagggtacctgcccatagtgttctgcggccacactaagggcaataaaaactacgccctacactctgacgactacaccccccaaggacagccatttggaggggctctaagcactacctcattctctttaaaagtactgtttgaccagcatcagagaggactgaataagtggtcgttccccaacgaccaactagacctggccagatacaggggctgcaaattctacttttacaggacaaaacagactgactggataggccagtatgatatatcagagccctacaagctagacaagtacagctgccccaactaccacccgggaaacatgattaaagcaaagcacaaatttttaattcccagctatgacactaatcccaggggcagacaaaaaattatagttaaaattccccccccagacctctttgtagacaagtggtacactcaggaagacctgtgttccgttaatcttgtgtcacttgcggtttctgcggcttcctttctccacccattcggctcaccacaaactgacaacccttgctacaccttccaggtgttgaaagagttctactaccaggcaataggcttctcagcaacagatcaacaaagagaaaaagtttttgatatattatacaaaaacaactcatactgggaatcaaacataactcccttttatgtaattaatgttaaaaaagggtctaacacaacacagtacatgtcacctcaaatttcagactcatcttttagaaagaaagtaaatactaactacaactggtatacctacgatgccaaaactaatgcatcacaattaaagcaactaagaaatgcatactttaaacaattaacctctgaaggcccacaacacacatactctgacaatggctacgccagtcagtggaccacccccagcacagacgcctacgaataccacttaggcatgtttagtactatatttttagccccagacagaccagtacctcgctttccctgcgcttaccaagatgttacttacaacccactaatggacaaaggagtgggcaaccatgtatggtttcaatacaacacaaaggcagacacacagctaatagttacaggagggtcctgcaaagcacacatacaagacatacccctatgggcagccttctatggatacagtgactttatagagtcagagctaggcccctttgtagacgcagacacagtaggccttatctgtgtaatatgcccttacactaaacctcccatgtacaacaagacaaatcccatgatggggtacgtgttttatgacagaaactttggtgacggcaaatggactgacggacggggcaaaatagagccctactggcaagttaggtggaggcccgaaatgcttttccaagaaactgtaatggcagacatagtacagacagggccctttagctacaaagatgaacttaaaaacagcacactagtatgcaagtacaaattctattttacctggggaggtaacatgatgttccaacagacgatcaaaaacccgtgcaagacggacggacaacccaccgactccagtagacaccctagaggaatacaagtggcggacccggaacaaatgggaccccgctgggtgttccactcctttgactggcgaaggggctatcttagcgagaaagctctcaaacgcctgcaagaaaaacctcttgactatgacgaatattttacacaaccaaaaagacctagaatctttcctccaacagaatcagcagagggagagttccgagagcccgaaaaaggctcgtattcagaggaagaaaggtcgcaagcctctgccgaagagcagacggaggaggcgacagtactcctcctcaagcgacgactcagagagcaacagcagctccagcagcagctccaattcctcacccgagaaatgttcaaaacgcaagcgggtctccacataaaccctatgttattaaaccagcgataa

SEQ ID NO: 200 - DNA, 2238 bp, Torque teno virus
atggcatggggatggtggagatggcggcgccgctggcccgccagacgctggaggagacgccgtcgccggcgccccgtacggagaacaagagctcgccgacctgctcgacgctatagaagacgacgaacagtaagaaccaggcggaggcggtgggggcgcagacggtacagacggggctggagacgcaggacttatgtaaggaaggggcgacacagaaaaaagaaaaagagactgatactgagacagtggcagcccgccaccagacgcagatgcaccataacagggtacctgcccatagtgttctgcggccacactaagggcaataaaaactacgccctacactctgacgactacaccccccaaggacagccatttggaggggctctaagcactacctcattctctttaaaagtactgtttgaccagcatcagagaggactgaataagtggtcgttccccaacgaccaactagacctggccagatacaggggctgcaaattctacttttacaggacaaaacagactgactggataggccagtatgatatatcagagccctacaagctagacaagtacagctgccccaactaccacccgggaaacatgattaaagcaaagcacaaatttttaattcccagctatgacactaatcccaggggcagacaaaaaattatagttaaaattccccccccagacctctttgtagacaagtggtacactcaggaagacctctgttccgttaatcttgtgtcacttgcggtttctgcggcttcctttctccacccattcggctcaccacaaactgacaacccttgctacaccttccaggtgttgaaagagttctactaccaggcaataggcttctcagcaacagatgaacaaagagaaaaagtttttgatatattatacaaaaacaactcatactgggaatcaaacataactcccttttatgtaattaatgttaaaaaagggtgtaacacaacacagtacatgtcacctcaaatttcagactcatcttttagaaagaaagtaaatactaactacaactggtatacctacgatgccaaaactaatgcatcacaattaaagcaactaagaaatgcatactttaaacaattaacctctgaaggcccacaacacacatactctgacaatggctacgccagtcagtggaccacccccagcacagacgcctacgaataccacttaggcatgtttagtactatatttttagccccagacagaccagtacctcgctttccctgcgcttaccaagatgttacttacaacccactaatggacaaaggagtgggcaaccatgtatggtttcagtacaacacaaaggcagacacacagctaatagttacaggagggtcctgcaaagcacacatacaagacatacccctatgggcagccttctatggatacagtgactttatagagtcagagctaggcccctttgtagacgcagacacagtaggccttatctgtgtaatatgcccttacactaaaccccccatgtacaacaagacaaatcccatgatggggtacgtgttttatgacagaaactttggtgacggcaaatggactgacggacggggcaaaatagagccctactggcaagttaggtggaggcccgaaatgcttttccaagaaactgtaatggcagacatagtacagacagggccctttagctacaaagatgaacttaaaaacagcacactagtatgcaagtacaaattctattttacctggggaggtaacatgatgttccaacagacgatcaaaaacccgtgcaagacggacggacaacccaccgactccagtagacaccctagaggaatacaagtggcggacccggaacaaatgggaccccgctgggtgttccactcctttgactggcgaaggggctatcttagcgagaaagctctcaaacgcctgcaagaaaaacctcttgactatgaccaatattttacacaaccaaaaagacctagaatctttcctccaacagaatcagcagagggagagttccgagagcccgaaaaaggctcgtattcagaggaagaaaggttgcaagcctctgccgaagagcagacggaggaggcgacagtactcctcctcaagcgacgactcagagagcaacagcagctccagcagcagctccaattcctcacccgagaaatgttcaaaacgcaagcgggtctccacataaaccctatgttattaaaccagcgataa

SEQ ID NO: 201 - DNA, 2238 bp, Torque teno virus
atggcatggggatggtggagatggcggcgccgctggcccgccagacgctggaggagacgccgtcgccggcgccccgtacggagaacaagagctcgccgacctgctcgacgctatagaagacgacgaacagtaagaaccaggcggaggcggtgggggcgcagacggtacagacggggctggagacgcaggacttatgtaaggaaggggcgacacagaaaaaagaaaaagagactgatactgagacagtggcagcccgccaccagacgcagatgcaccataacagggtacctgcccatagtgttctgcggccacactaagggcaataaaaactacgccctacactctgacgactacaccccccaaggacagccatttggaggggctctaagcactacctcattctctttaaaagtactgtttgaccagcatcagagaggactgaataagtggtcgttccccaacgaccaactagacctggccagatacaggggctgcaaattctacttttacaggacaaaacagactgactggataggccagtatgatatatcagagccctacaagctagacaagtacagctgccccaactaccacccgggaaacatgattaaagcaaagcacaaatttttaattcccagctatgacactaatcccaggggcagacaaaaaattatagttaaaattccccccccagacctctttgtagacaagtggtacactcaggaagacctgtgttccgttaatcttgtgtcacttgcggtttctgcggcttcctttctccacccattcggctcaccacaaactgacaacccttgctacaccttccaggtgttgaaagagttctactaccaggcaataggcttctcagcaacagatgaacaaagagaaaaagtttttgatatattatacaaaaacaactcatactgggaatcaaacataactcccttttatgtaattaatgttaaaaaagggtgtaacacaacacagtgcatgtcacctcaaatttcagactcatcttttagaaagaaagtaaatactaactacaactggtatacctacgatgccaaaactaatgcatcacaattaaagcaactaagaaatgcatactttaaacaattaacctctgaaggcccacaacacacatactctgacaatggctacgccagtcagtggaccacccccagcacagacgcctacgaataccacttaggcatgtttagtactatatttttagccccagacagaccagtacctcgctttccctgcgcgtaccaagatgttacttacaacccactaatggacaaaggagtgggcaaccatgtatggtttcagtacaacacaaaggcagacacacagctaatagttacaggagggtcctgcaaagcacacatacaagacatacccctatgggcagccttctatggatacagtgactttatagagtcagagctaggcccctttgtagacgcagacacagtaggccttatctgtgtaatatgcccttacactaaaccccccatgtacaacaagacaaatcccatgatggggtacgtgttttatgacagaaactttggtgacggcaaatggactgacggacggggcaaaatagagccctactggcaagttaggtggaggcccgaaatgcttttccaagaaactgtaatggcagacatagtacagacagggccctttagctacaaagatgaacttaaaaacagcacactagtatgcaagtacaaattctattttacctggggaggtaacatgatgttccaacagacgatcaaaaacccgtgcaagacggacggacaacccaccgactccagtagacaccctagaggaatacaagtggcggacccggagcaaatgggaccccgctgggtgttccactcctttgactggcgaaggggctatcttagcgagaaagctctcaaacgcctgcaagaaaaacctcttgactatgaccaatattttacacaaccaaaaagacctagaatctttcctccaacagaatcagcagagggagagttccgagagcccgaaaaaggctcgtattcagaggaagaaaggtcgcaagcctctgccgaagagcggacggaggaggcgacagtactcctcctcaagcgacgactcagagagcaacagcagctccagcagcagctccaattcctcacccgagaaatgttcaaaacgcaagcgggtctccacataaaccctatgttattaaaccagcgataa

SEQ ID NO: 202 - DNA, 2181 bp, Torque teno virus
atggcatggagatggtggaagcgacggaggcgctggtggttccgcaagcggtggacccgtggcagacttcgcagacgatggcctcgaccagctcgtcgccgacctagacgacgaagagtaaggagacgcagacgttggaggagggggcgacccagacgtagactgtaccgacgctacagacgcaaaaaacgtaggagacgaaagcccaaaataatcttaaaacaatggcagccagacattgtaaagaggtgctacatagtgggctacattcctgccataatatgtggggcgggcacctggtctcacaactacaccagccaccttctagacattatccccaagggaccctttggaggagggcacagcactatgaggttctccctaaaagtactctctgaagaacacctcagacacttaaacttttggacaaagagtaaccaggacctagaactgataagatactttagatgctcctttaaattttatagagaccaagacacagactacatagtacactacagcagaaaaactcccctgggaggcaacagactgacagcacctaacctgcacccaggggtacaaatgcttagcaaaaacaaaataatagtacctagctatgctacaaaacccaagggtcctagctatataaaagtaaccatagcaccccccacactgctaactgacaagtggtactttagcaaagacgtttgtgacacaaccttggttaacttagacgttgtactctgcaacctgcggtttccgttctgctcaccacaaactgacaacccttgcatcacattccaagttctgcattccatctacaacgacttcctctctatagtagatactaacaactataaagaatcttttgttagtgcattaccaacaaaagtatctactgactggggcaaaagactaaacacctttagaacagaaggatgctattcacaccccaaattacataaaaaagctgtaacagctgctacagatacagaatactttacaaagccagatggtctgtggggagacactatatttgatgtagaaaatggacaaaaaattataaaaaatatggagtcatatgctaagtcagccaaagaaagagggatcaatggagaccctgctttctgtcacttaacaggaatatactcacctccctggttaacaccagggagaatatctccagaaacacctggactttacacagacgtgacttacaacccttacgctgacaaaggagtgggcaacagaatatgggttgactactgcagtaaaaaaggcaacaaatatgacaatacaagtaaatgccttttagaagacatgccactatggatggtatgctttggctatgtagactgtgtaaaaaaagaaaccggcaactggggcattccactatgggctagagtacttataagaagcccatatactgttcccaaactatataatgaagcagacccaaactatggatgggtacctattttttactattttggagaaggcaaaatgccaaacggagacatgtacataccatttaaaataagaatgaaatggtacccttcaatgtggaaccaagagccagtattaaatgacttagcaaagagcggaccgtttgcatacaaaaacaccaaaacaagtgtgactgtgactgccaaatataaattcacatttaacttcggtggcaaccccgtaccctcacagattgtacaagatccctgcacacagcccacctacgacatccccggcaccggtaacctgcctcgcagaatacaagtcattgacccgaaagtcctcagtccccactattccttccaccggtgggacttcagacgtggcctgtttggctcacaagctattaagagagtgtcagaacaatcaacaacttctgagtttttattctcaggcccaaagaaacccagaatcgatcaaggtccttacatcccgccagaaaaaggctcaggttcactccaaagagaaccgagaccgtggagcagctcggagaccgaggcagagacagaagccccctcggaagaagagccggagaaccaagaagaacaagtactccagttgcagctcagacagcagctccgagaacagcgaaaactcagacagggaatccagtgcctattcgagcaactaataacaactcagcagggggtccacaaaaacccattgttagagtag

SEQ ID NO: 203 - DNA, 2181 bp, Torque teno virus
atggcatggagatggtggaagcgacggaggcgctggtggttccgcaagcggtggacccgtggcagacttcgcagacgatggcctcgaccagctcgtcgccgacctagacgacgaagagtaaggagacgcagacgttggaggagggggcgacccagacgtagactgtaccgacgctacagacgcaaaaaacataggagacgaaagcccaaaataatcttaaaacaatggcagccagacattgtaaagaggtgctacatagtgggctacattcctgccataatatgtggggcgggcacctggtctcacaactacaccagccaccttctagacattatccccaagggaccctttggaggagggcacagcactatgaggttctccctaaaagtactctttgaagaacacctcagacacttaaacttttggacaaagagtaaccaggacctagaactgataagatactttagatgctcctttaaattttatagagaccaagacacagactacatagtacactacagcagaaaaactcccctgggaggcaacagactgacagcacctaacctgcacccaggggtacaaatgcttagcaaaaacaaaataatggtacctagctatgctacaaaacccaagggtcctagctatataaaagtaaccatagcaccccccacactgctaactgacaagtggtactttagcaaagacgtttgtgacacaaccttggttaacttagacgttgtactctgcaacctgcggtttccgttctgctcaccacaaactgacaacccttgcatcacattccaagttctgcattccatctacaacgacttcctctctatagtagatactaacaactataaagaatcttttgttagtgcattaccaacaaaagtatctactgactggggcaaaagactaaacacctttagaacagaaggatgctattcacaccccaaattacataaaaaagctgtaacagctgctacagatacagaatactttacaaagccagatggtctgtggggagacactatatttgatgtagaaaatggacaaaaaattataaaaaatatggagtcatatgctaagtcagccaaagaaagagggatcaatggagaccctgctttctgtcacttaacaggaatatactcacctccctggttaacaccagggagaatatctccagaaacacctggactttacacagacgtgacttacaacccttacgctgacaaaggagtgggcaacagaatatgggttgactactgcagtaaaaaaggcaacaaatatgacaatacaagtaaatgccttttagaagacatgccactatggatggtatgctttggctatgtagactgggtaaaaaaagaaaccggcaactggggcattccactatgggctagagtacttataagaagcccatatactgttcccaaactatataatgaagcagacccaaactatggatgggtacctatttcttactattttggagaaggcaaaatgccaaacggagacatgtacataccatttaaaataagaatgaagtggtacccttcaatgtggaaccaagagccagtattaaatgacttagcaaagagcggaccgtttgcatacaaaaacaccaaaacaagtgtgactgtgactgccaaatataaattcacatttaacttcggtggcaaccccgtaccctcacagattgtacaagatccctgcacacagcccacctacgacatccccggcaccggtaacctgcctcgcagaatacaagtcattgacccgaaagtcctcggtccccactattccttccaccggtgggacttcagacgtggcctgtttggctcacaagctattaagagagtgtcagaacaatcaacaacttctgagtttttattctcaggcccaaagaaacccagaatcgatcaaggtccttacatcccgccagaaaaaggctcaggttcactccaaagagaaccgagaccgtggagcagctcggagaccgaggcagagacagaagccccctcggaagaagagccggagaaccaagaagaacaagtactccagttgcagctcagacagcagctccgagaacagcgaaaactcagacagggaatccagtgcctattcgagcaactaataacaactcagcagggggtccacaaaaacccattgttagagtag

SEQ ID NO: 204 - DNA, 2181 bp, Torque teno virus
atggcacggagatggtggaagcgacggaggcgctggtggttccgcaagcggtggacccgtggcagacttcgcagacgatggcctcgaccagctcgtcgccgacctaaacgacgaagagtaaggagacgcagacgttggaggagggggcgacccagacgtagactgtaccgacgctacagacgcaaaaaacgtaggagacgaaagcccaaaataatcttaaaacaatggcagccagacattgtaaagaggtgctacatagtggactacattcctgccataatatgtggggcgggcacctggtctcgcaactacaccagccaccttctagacattatccccaagggaccctttggaggagggcacagcactatgaggttctccctaaaagtactctttgaagaacacctcaggcacttaaacttttggacaaagagtaaccaggacctagaactgataagatactttagatgctcctttaaattttatagagaccaagacacagaccacatagtacactacagcagaaaaactcccctgggaggcaacagactgacagcacctaacctgcacccaggggtacaaatgcttagcaaaaacaaaataatagtacctagctatgctacaaaacccaagggtcctagctatataaaagtaaccatagcaccccccacactgctaactgacaagtggtactttagcaaagacgtttgtgacacaaccttggttaacttagacgttgtactctgcaacctgcggtttccgttctgctcaccacaaactgacaacccttgcatcacattccaagttctgcattccatctacaacgacttcctctctatagtagatactaacaactataaagaatcttttgttgctgcattaccaacaaaagtatctactgactggggcaaaagactaaacacctttagaacagagggatgctattcacaccccaaattacataaaaaagctgtaacagctgctacagatacagaatactttacaaagccagatggtctgtggggagacactatatttgatgtagaaaatggacaaaaaattataaaaaatatggaatcatatgctaagtcagccaaagaaagagggatcaatggagaccctgctttctgtcacttaacaggaatatactcacctccctggttaacaccagggagaatatctccagaaacacctggactttacacagacgtgacttacaacccttacgctgacaaaggagtgggcaacagaatatgggttgactactgcagtaaaaaaggcaacaaatatggcaatacaagtaaatgccttttagaagacatgccactatggatggtatgctttggctatgtagactgggtaaaaaaagaaaccggcaactggggcattccactatgggctagagtacttataagaagcccatatactgttcccaaactatataatgaagcagacccaaactatggatgggtacctatttcttactattttggagaaggcaaaatgccaaacggagacatgtacgtaccatttaaaataagaatgaaatggtacccttcaatgtggaaccaagagccagtattaaatgacttagcaaagagcggaccgtttgcatacaaaaacaccaaaacaagtgtgactgtgactgccaaatataaattcacatttaacttcgggggcaaccccgtaccctcacagattgtacaagatccctgcacacagcccacctacgacatccccggcaccggtaacctgcctcgcagaatacaagtcattgacccgaaagtcctcggtccccactattccttccaccggtgggacttcagacgtggcctgtttggctcacaagctattaagagagtgtcagaacaatcaacaacttctgagtttttattctcaggcccaaagaaacccagaatcgatcaaggtccttacatcccgccagaaaaaggctcaggttcactccaaagagaaccgagaccgtggagcagctcggagaccgaggcagagacagaagccccctcggaagaagagccggagaaccaagaagaacaagtactccagttgcagctcagacagcagctccgagaacagcgaaaactcagacagggaatccagtgcctattcgagcaactaataacaactcagcagggggtccacaaaaacccattgttagagtag

SEQ ID NO: 205 - DNA, 2181 bp, Torque teno virus
atggcatggagatggtggaagcgacggaggcgctggtggttccgcaagcggtggacccgtggcagacttcgcagacgatggcctcgaccagctcgtcgccgacctaaacgacgaagagtaaggagacgcagacgttggaggagggagcgacccagacgtagactgtaccgacgctacagacgcaaaaaacgtaggagacgaaagcccaaaataatcttaaaacaatggcagccagacattgtaaagaggtgctacatagtgggctacattcctgccataatatgtggggcgggcacctggtctcacaactacaccagccaccttctagacattatccccaagggaccctttggaggagggcacagcactatgaggttctccctaaaagtactctttgaagaacacctcaggcacttaaacttttggacaaagagtaaccaggacctagaactgataagatactttagatgctcctttaaattttatagagaccaagacacagactacatagtacactacagcagaaaaactcccctgggaggcaacagactgacagcacctaacctgcacccaggggtacaaatgcttagcaaaaacaaaataatagtacctagctatgctacaaaacccaagggtcctagctatataaaagtaaccatagcaccccccacactgctaactgacaagtggtactttagcaaagacgtttgtgacacaaccttggttaacttagacgttgtactctgcaagctgcggtttccgttctgctcaccacaaactgacaacccttgcatcacattccaagttctgcattccatctacaacgacttcctctctatagtagatactaacaactataaagaatcttttgttgctgcattaccaacaaaagtatctactgactggggcaaaagactaaacacctttagaacagaaggatgctattcacaccccaaattacataaaaaagctgtaacagctgctacagatacagaatactttacaaagccagatggtctgtggggagacactatatttgatgtagaaaatggacaaaaaattataaaaaatatggaatcatatgctaagtcagccaaagaaagagggatcaatggagaccctgctttctgtcacttaacaggaatatactcacctccctggttaacaccagggagaatatctccagaaacacctggactttacacagacgtgacttacaacccttacgctgacaaaggagtgggcgacagaatatgggttgactactgcagtaaaaaaggcaacaaatatgacaatacaagtaaatgccttttagaagacatgccactatggatggtatgctttggctatgtagactgggtaaaaaaagaaaccggcaactggggcattccactatgggctagagtacttataagaagcccatatactgttcccaaactatataatgaagcagacccaaactatggatgggtacctatttcttactattttggagaaggcaaaatgccaaacggagacatgtacgtaccatttaaaataagaatgaaatggtacccttcaatgtggaaccaagagccagtattaaatgacttagcaaagagcggaccgtttgcatacaaaaacaccaaaacaagtgtgactgtgactgccaaatataaattcacatttaacttcgggggcaaccccgtaccctcacagattgtacaaaatccctgcacacagcccacctacgacatccccggcaccggtaacctgcctcgcagaacacaagtcattgacccgaaagtcctcggtccccactattccttccaccggtgggacttcaggcgcggcctgtttggctcacaagctattaagagagtgtcagaacaatcaacaacttctgagtttttattctcaggcccaaagaaacccagaatcgatcaaggtccttacatcccgccagaaaaaggctcaggttcactccaaagagaaccgagaccgtggagcagctcggagaccgaggcagagacagaagccccctcggaagaagagccggagaaccaagaagaacaagtactccagttgcagctcagacagcagctccgagaacagcgaaaactcagacagggaatccagtgcctattcgagcaactaataacaactcagcagggggtccacaaaaacccattgttagagtag

SEQ ID NO: 206 - DNA, 2232 bp, Torque teno virus
atggcctggggatggtggaaacgcagacggcgccgatggtggagaggcctctggaggagacgccgctttgccagaagacgacctagacggcctgctcgccgccctagacgacgaagagtaaggagacgcagacggtggaggagggggcgactaaggaggcgcgtgtacaacaggagacgcaggatcagacgaaagagacgcagacagaaactgacaataagacagtggcagcctgacaaacgcaggatatgtagaattaaaggctaccttcctgccattatatatggagacgggacgttttctaaaaactatacaagtcacttagaggacagaatctccaaaggaccgtttgggggagggcacgggactgctagaatgtctcttaaagtactgtatgacgaccacctaaaaggacttaacatatggacgtatagtaacaaggacttggaactggtcagatacatgcacaccacaattacattttacagacacccagacacagactttatagcagtatacaacagaaaaacaccactaggtggcaacagatacacagcaccctcactgcaccctggtaacatgatgctgcagagaactaaaatactaatccctagctttaaaaccaaacccagagggagcggcaaaattagagtagtaataaaaccccccactctgttagtagataagtggtactttcaaaaggacatatgcgacgttacactgtttaacctcaacattacagcagctagcctgcggtttccgttctgctcaccacaaacgaacaacccttgtgtaacattccaagttctgcattctgtgtatgacaaagcattaggcattaacacatttggtaccaaagaaacaccagaagatcagcaaatggaagatattaaaaactggcttaccaaagctctaaatactgcaggctttactgtactaaatacatttagaacagaaggtatatactcacacccacaactaaaaaaaccacctgaaggaagtaacaaacctagtgcagaacagtactttgctccactagacagcttatggggagacaagatatatgtaaataataatactagtccttcacaaacagaagcaacaattccaggtatattagccagaaatgcttgcacatactatcaaaaagctaaaacaagcacactaaggcagcacctaggcgctatggcacactgtcacctaacaggaatttttaaccctgcactactaacacagggcagactatcaccagaattttttggcctatacaaagaaattatttataacccctatgatgacaaaggcaaaggaaacagaatatggatagacccattaacaaaacctgacaacatatttgatgctagaagtaaagtagaactagaagatatgcctctttggatggcatgctttggatataatgactggtgtaaaaaagagctaaataactggggcctagaagtagaatacagagtactactaagatgcccttacacatatccaaaactgtacaatgatgctaacccaaactatggctatgtacctatatcctacaactttagtgcaggaaaaactgtagaaggggatctttatgttccaataatgtggagaactaaatggcatccaacaatgtacaatcaatctccagtactagaagatttagccatggcagggccttttgctccaaaagaaaaaatacctagcagcacacttacaataaaatacaaagctaaatttatattcgggggcaatcctatatctgaacagattgtcaaggacccctgcacccagcccacctacgaaattcccggaggcggtacgctccctcgcagaatacaagtcattaacccggaatacatcgggccacactactcattcaaaagcttcgacatcagacgtgggtactttagcgcgaagagtgttaaaagagtgtcagaacaatcagacattactgagtttatattctcaggtccaaaaaagccaaggatcgaccaagacaggtaccaagaagcagaagaacactcagattctcgactccgagaagagaaaccgtgggagagctcgcaagaaacagagagcgaagcccaagaagaagagatacaagagacaaacatccagctccagctgcagcaccagctcaaagagcaactgcagctcagacggggaatccagtgcctcttcgagcaactaaccaaaacccagcagggagtccacataaacccttccctcgtgtag

SEQ ID NO: 207 - DNA, 1812 bp, Torque teno virus
atgtctcttaaagtactgtatgacgaccacctaaaaggacttaacatatggacgtatagtaacaaggacttggaactggtcagatacatgcacaccacaattacattttacagacacccagacacagactttatagcagtatacaacagaaaaacaccactaggtggcaacagatacacagcaccctcactgcaccctggtaacatgatgctgcagagaactaaaatactaatccctagctttaaaaccaaacccagagggagcggcaaaattagagtagtaataaaaccccccactctgttagtagataagtggtactttcaaaaggacatatgcgacgttacactgtttaacctcaacattacagcagctagcctgcggtttccgttctgctcaccacaaacgaacaacccttgtgtaacattccaagttctgcattctgtgtatgacaaagcattaggcattaacacatttggtaccaaagaaacaccagaagatcagcaaatggaagatattaaaaactggcttaccaaagctctaaatactgcaggctttactgtactaaatacatttagaacagaaggtatatactcacacccacaactaaaaaaaccacctgaaggaagtaacaaacctagtgcagaacagtactttgctccactagacagcttatggggagacaagatatatgtaaataataatactagtccttcacaaacagaagcaacaattccaggtatactagccagaaatgcttgcacatactatcaaaaagctaaaacaagcacactaaggcagcacctaggcgctatggcacactgtcacctaacaggaatttttaaccctgcactactaacacagggcagactatcaccagaattttttggcctatacaaagaaattatttataacccctatgatgacaaaggcaaaggaaacagaatatggatagacccattaacaaaacctgacaacatatttgatgctagaagtaaagtagaactagaagatatgcctctttggatggcatgctttggatataatgactggtgtaaaaaagagctaaataactggggcctagaagtagaatacagagtactactaagatgcccttacacatatccaaaactgtacaatgatgctaacccaaactatggctatgtacctatatcctacaactttagtgcaggaaaaactgtagaaggggatctttatgttccaataatgtggagaactaaatggtatccaacaatgtacgatcaatctccagtactagaagatttagccatggcagggccttttgctccaaaagaaaaaatacctagcagcacacttacaataaaatacaaagctaaatttatattcggggcaatcctatatctgaacagattgtcaaggacccctgcacccagcccacctacgaaattcccggaggcggtacgctccctcgcagaatacaagtcattaacccggaatacatcgggccacactactcattcaaaagcttcgacatcagacgtgggtactttagcgcgaagagtgttaaaagagtgtcagaacaatcagacattactgagtttatattctcaggtccaaaaaagccaaggatcgaccaagacaggtaccaagaagcagaagaacactcagattctcgactccgagaagagaaaccgtgggagagctcgcaagaaacagagagcgaagcccaagaagaagagatacaagagacaaacatccagctccagctgcagcaccagctcaaagagcaactgcagctcagacggggaatccagtgcctcttcgagcaactaa

SEQ ID NO: 208 - DNA, 2199 bp, Torque teno virus
atggcctggagatggtggtggagacgcaggcgcccgtggcgatggagatggaggcgaaggagacgaccagctagacgccgaagacgtagaagacctgctcggcgtgctagacgacccagagtaaggagatggcgcaggcgcagggtgtgggcgcccaggccatacataagaaggcgcaggcgaagcttccgtagaaaaaaaattaaaataactcagtggaaccccgctgttactaaaaaatgtactgtaactgggtacctaccagttatatactgtggaaccggggacataggaaccacttttcagaactttggctctcatatgaatgagtacaaacagtataacgctgcgggagggggctttagcacaatgctttttaccatgcaaaacctgtatgaagagtaccaaaaacatagatgcagatggtctaaaagcaatcaagacctagacctgtgtagatatctagactgtaaactaacattttacagatcccctaacacagactttatagttggctacaatagaaagcctccctttatagacactcaaataacaagatgtactttacatccaggaatgctaatacaagaaagaaaaaaagtaataatacctagcttccaaaccaggccaaaaggtagaataaaacgcaaaattaaagtaaggccccccaccttattcacagacaaatggtactttcagagagacctctgtaaagttcctcttgtaacggtttccgcttctgcggcgagcctgcggtttccgttcggctcaccacaaacagaaaactattgcatatacttccaggttttagatccctggtaccacacccgcctgagcataactggtggaaagccagctgaatattggacacagctaaaagcttatttaactcaaggctggggcaggtcaacaaataatgcaggatatcaacatggtccactaggtacttactttaatacacttaaaacatcagaacatattagacaacccccagcagataactacaaacaagcaaataaagatactacatactatggaagagtagacagtcactggggagatcatgtataccaacaaacaataatacaagccatggaagaaaaccaaagcaacatgtacacaaaaagagcacttcacacattcttaggcagtcaatatctaaactttaaatcaggtctatttagcagtatatttctagataatgccagactaagcccagactttaaaggtatgtaccaagaagttgtttataacccctttaatgacagaggagtaggcaacaaagtatgggttcagtggtgcacaaacgaggacacaatatttaaagacctaccaggcagagttcctgtggtagatttaccattgtggtgcgcgttaatgggctactcagactactgcaaaaaatatttccacgacgatggcttcttaaaagaggccagaataactataatcagcccatacacaaatcctccactaattaacaacaaaaatacaaatgagggctttgtaccctacagtttctactttggaaaaggcagaatgccagacggcaatgggtacatacccatagactttagatttaactggtacccttgcatatttcaccaaacaaactggataaatgacatggttcaatgcggaccctttgcctaccacggagatgaaaagaactgttctctcactatgaaatacaagtttaaatttctatttgggggcaatcctatctcacaacagactatcaaagacccttgccaacaacccgactggcaacttcccggttccggtagattccctcgcgatgtacaagtatcgaacccgcgcttgcaaaccgaagggtccacgttccacgcgtgggacttcagacggggtttctatggcaaaagagctattgaaagactgcagggacaacaagatgatgttacatatattgcaggacctccaaaaaggccccgcttcgaggtcccagccctggctgccgaaggaagctcaaatacacgccgatcagagttgccatggcaaacctcagaagaagaaagctcgcaagaagaaaactcagaagagacagaagaagaaacctcgttatcgcagcagctcaagcagcagtgcatcgagcagaagctcctcaagcgaacgctccaccaactcgtcaagcaattagtaaagacccagtatcacctacacgcccccattatccactaa

SEQ ID NO: 209 - DNA, 2181 bp, Torque teno virus
atggcatggagatggtggaagcgacggaggcgctggtggttccgcaagcggtggacccgtggcagacttcgcagacgatggcctcgaccagctcgtcgccgccctagacgacgaagagtaaggagacgcagacggtggaggagggggcgacccagacgcagactgtaccgacgctacagacgcaaaaaacgtaggagacgaaagcccaaaataatcttaaaacaatggcagccagacattgtaaaaagatgctatataataggctacattcctgccataatatgtggggctggcacctggtcccacaactacaccagccacctgttagacattatccccaagggaccctttggaggagggcacagcactatgagattctccctaaaagtactctttgaagaacacctcagacacttaaacttttggacaaaaagcaaccaggacctagaacttataagatactttagatgctcctttaaattctatagagaccaagacacagactacatagtacactacagcagaaagactcccctaggaggcaacagactgacagcacctagcctacaccccggggtacagatgcttagcaaaaacaaaatattagtacctagctatgctacaaaacccaagggtggtagctatgtaaaagtaaccatagcaccccccacactactaactgacaagtggtactttagcaaagacgtttgtgacacaaccttggttaacttagacgtcgtactctgcaacttgcggtttccgttctgctcaccacaaactgacaacccttgcatcacattccaagttctgcattcttactacaacgactacctctctatagtagacaccgccttatacaaaaccagctttgtaaacaatttaagtacaaaactaggtacaacatgggcaaacagactaaacacatttagaacagaaggctgctactcacatccaaaattgctcaaaaaaacagtaacagctgcaaatgacaccaaatattttactacaccagacggactctggggagatgcagtatttgatgtttcagacgcaaaaaaactaactaaaaacatggaaagttatgctgcctctgctaacgaaagaggcgtacaaggagaccctgccttttgccacctaacaggcatattctcacctccctggctaacaccaggcagaatatctcctgaaaccccaggactttacacagacgtgacttacaacccatacgcagacaaaggagtgggcaacagaatatgggttgactactgtagtaaaaaaggcaataaatatgacaatacaagtaaatgcgtgttagaagacatgccactatggatgttatgctttggctatgtagactgggtaaaaaaagagactggcaactggggcattccactatgggccagagtacttataagaagcccatatactgtcccaaaactataccatgaaaacgaccctgactacggatgggttccaatttcctactactttggagaaggcaaaatgccaaacggagacatgtacgtaccatttaaagtaagaatgaaatggtacccttcaatgtggaaccaagagccagttttaaatgacttagcaaagagcggaccgtttgcatacaagaacaccaaaacaagcgtgactgtgactgccaaatataaattcacatttaacttcgggggcaaccccgtaccctcacagattgtacaagatccctgcacacagcccacctacgacatccccggcaccggtaacctgcctcgcagaatacaagtcattgacccgaaagtcctcggtccccactattccttccaccggtgggacttcaggcgtggcctctttggcacacaagctattaaaagagtgtcagaacaatcaacaacttctgagtttttattctcaggcccaaagaaacccagaatcgatcaaggcccttacatcccgccagaaaaaggctcaggttcactccaaagagaatcgagaccgtggagcagctcggagaccgaggcagagacagaagccccctcggaagaggagccggagaaccaagaagaacaagtactccagttgcagctcagacagcagctccgagaacagcgaaaactcagacagggaatccagtgcctattcgagcaactgataacaacccagcagggggtccacaaaaacccattgttagagtag

SEQ ID NO: 210 - DNA, 2283 bp, Torque teno virus
atggcctggtggggacggtggagaagatggcgctggaggccccgtcgctggcggcgccgtcgcagacgccgagtaccaagaagaagagctcaacgctctgttcgacgccgtcgagcaagaagagtaaggaggaggcgatgggggaggcggaggtggagacgggggtacagacgcagactgagactaagacgcaaacgcaaacgaaaacgcagacttgtactgactcagtggcaccccgctaaagtaaggaggtgcagaatatctggggtcctacccatgatactgtgcggtgctggcaggagtagctttaactacgggctgcacagcgatgactttactaaacagaaaccaaacaatcagaacccgcacggcgggggcatgagcactgtgacttttaacctaaaggtgctctttgaccaatacgaaagatttatgaacaagtggtcgtaccccaacgaccaactagacctcgccagatacaaaggctgtaaattcaccttctacagacacccagaagttgactttctagctcaatatgacaacgttccccctatgaaaatggacgaactgactgcccctaacactcaccccgcactgctgctacagagcagacacagggtaaagatatacagctggaaaaccaggccatttggctctaaaaaagtaacagtaaaaataggaccccccaaactgtttgaagacaagtggtacagccagtctgacttgtgcaaagtttcccttgtcagttggcggttaaccgcatgtgacttcaggtttccgttctgctcaccacaaactgacaacccttgtgtaaccttccaggtgctaggagaacagtattacgaagtctttggaacttccgtattggacgttcctgcatcctataactcacaaataactacatttgaacaatggctatataaaaaatgcacccactatcaaacattcgccacagacaccagattagccccccaaaagaaagcaaccacatccaccaaccacacatataaccccagtggcaacactgaatcatcaacatggacacaaagtaactactccaaatttaaaccaggcaacacagacagcaactatggctactgcagttataaagtagacggcgaaacatttaaggccattaaaaattacagaaagcaaagattcaaatggctaaccgaatacacaggagagaatcacataaacagcacatttgcaaagggcaaatatgatgaatacgagtaccacctagggtggtactctaacatatttataggcaaccttagacacaacctggcattccgctcagcatacatagatgtaacttacaaccccacagtagacaaaggcaaaggcaacatagtgtggttccagtacctgacaaaacccaccacacagctgataagaacacaggcaaaatgcgttatagaagacctgccactttactgtgccttttttggctacgaggactatatacagagaacactaggcccttaccaggacatagagacagtaggcgtcatctgctttataagcccctacacagaacctccatgtattagaaaagaagagcaaaaaaaggactggggctttgtattttatgacaccaactttggaaacggaaaaacaccagagggcataggccaagttcacccctactggatgcagaggtggagagtaatggcccagtttcaaaaagaaactcaaaacagaattgccaggagcggaccgtttagctacagagacgacataccctcagccacactgactgccaactacaagttctactttaactgggggggcgactctatatttccacagattattaagaacccctgccccgacaccgggctgcgacccagtggccatagagagcctcgctcagtacaagtcgttagcccgctcaccatgggaccagagttcatattccaccgctgggactggcgacgggggttctataatccaaaagctctcaaacgaatgcttgaaaaatcagataatgatgcagagtcttcaacaggcccaaaagtgcctcggtggtttccagcacaccacgaccaagagcaagaaagcgacttcgattcacaagagacaaggtcgcagtcctcgcaagaagaagccgctcaagaagccctccaagacgtccaagagacgtcggtacagcagtacctcctcaagcagttccgagagcagcggctactcggacagcaactccgcctcctcatgctccaactcaccaagacgcaaagcaatctccacataaatccccgtgtccttgaccatgcataa

SEQ ID NO: 211 - DNA, 2220 bp, Torque teno virus
atgttctggtggggatggcgccgccgatggtggtggaagccacggaggcgatggagacgcaggagggcgcgccgcccgagacgagtaccgcgaagacgatatagaagagctgctcgccgctatcgaggcagacgagtaaggaggcgccgcgcggggggctggcgggggcgacgtagatactcccgacactatagcagacgactgactgtcaggcgaaagaaaaagaaactgactcttaagatctggcagccacagaatatcaggaaatgtagaataaggggtctcctgcccctcctgatatgcgggcacacccgttcggcctttaactatgccatccactcggatgacaagaccccccaacaggagagtttcgggggcggcctcagcaccgtcagcttctccttaaaagtactgtttgaccagaaccagaggggacttaataggtggtcggccagcaacgaccaactggaccttgctcggtacctggggtgcactttctggttctacagagacaaaaagactgattttatagtgcagtatgatatcagcgcccccttcaagctggacaaaaacagcagtcccagctaccaccccttcatgctcatgaaggcaaaacacaaggtgctaattcccagctttgacactaaacccaagggcagggaaaaaattaaagttagaatacagccccccaaaatgttcatagacaagtggtacacacaagaggacctgtgtcccgttattcttgtgtcacttgcggttagcgtagcttcctttacacatccgttctgctcaccacaaactgccaatccttgcatcaccttccaggttttgaaagagttctattacccagccatgggctatggggcccctgaaacaactgtcacttctgtatttaacactttatataccacagccacctactggcagtctcaccttaccccccagtttgtcagaatgcccaccaaaaacccagacaatactgaaaacaaccaagctcaagcctttaatacctgggttgataaagatttcaaaacaggcaagttagtaaagtataactttccccagtatgctccttcaatagagaaactaaaacaattaagaacatactactttgaatgggaaactaaacacactggggttgcagcaccacctacctggaccacccctacctcagacagatacgagtaccatatgggaatgttcagtcccactttcctcacaccgttcaggtcagctggcctagactttcccggagcctaccaggacgtcacctacaatcccctcacagacaagggggtgggcaacagaatgtggttccaatacaacaccaagatagacactcagttcgacgccaggtcctgcaagtgcgtactagaggacatgcccctgtacgccatggcctacgggtatgcagactttttagagcaagagataggagagtaccaggacctagaggccaacgggtacgtctgtgtaataagcccctacaccaaacccccaatgttcaacaaacacaacccgcaacaggggtacgtattctatgactctcagtggggcaacggcaagtggatagacggaaccgggttcgtgcccgtctactggctgaccagatggagagtagagctgctatttcagaaaaaagtactgtcagacatcgccatgtcaggccccttcagctacccagacgaacttaaaaacactgtactgacggccaaatacagatttgactttaagtggggtggcaatctcttccaccagcagaccattagaaacccctgcaaaccagaagagacctcgaccggtagagtccctcgcgatgtacaagtcgttgacccggtcaccatgggccccagattcgtctttcactcctgggactggaggcgagggttccttagtgacagagctctcaaaagaatgtttgaaaaaccgctcgatcttgagggatttgcagcgtctccaaaacgacctcgcatattccctcccacagagggacagctcgcccgagagcaaaaagagcaagaagaaagctcagattcgcaggaagaaagcagccttacctcgctcgaagaagtcccggaagagacgaagctacgactccacctcagaaagcagctcagagagcagcgaagcatcagacagcaactccgaaccatgttccagcaacttgtcaagacgcaagcgggcctacacctaaacccccttttatcttcccagctgtaa

SEQ ID NO: 212 - DNA, 2304 bp, Torque teno virus
atggcctggcgatggtggtggcagagacgatggcgccgccgcccgtggccccgcagacggtggagacgcctacgacgccggagacctcgacgacctgttcgccgccgtcgaagacgagcaacagtaaggaggcggaggtggaggggcagacgtgggcgacgcacatacacccgacgcgcggtcagacgcagacgcagacccagaaagagatttgtactgactcagtggagcccccagacagccagaaactgttcaataaggggcatagtgcccatggtaatatgcggacacaccagagcaggtagaaactatgcccttcacagcgaggactttaccactcagataagaccctttggaggcagcttcagcacaaccacctggtccctaaaagtactgtgggacgaacaccagaaattccaaaacagatggtcctacccaaacacacagctggacctagccaggtacaggggggtcaccttctggttctacagagaccagaaaacagactatatagtacaatggagcagaaatcctccctttaaactaaacaaatacagcagccccatgtaccaccctggaatgatgatgcaggcaaaaaagaaactggtggtccccagtttccagaccagacctaaaggcaaaaagagatacagagtcagaataagaccccccaacatgttcaatgacaagtggtacactcaagaggacctttgtccagtacctcttgtgcaaattgtggtttctgcggctacccagacaaaaaagaactgctcaccacaaacgaacaacccttgcatcactttccaggttttgaaagacaagtacttaaactacataggagttaactcttccgagacccgaagaaacagttataaaactctacaagagaaactttactcacaatgcacatactttcaaaccacacaagttttagctcaattatctccagcatttcagcccgcaaagaaacctaacagaaccaacaactcaaccagcacaacactaggcaacaaagtcacagacctaaaatccaacaatggcaaattccacacaggcaacaacccagtgtttggcatgtgttcatataaacccagcaaggacatactatataaagcaaacgaatggttgtgggacaatctcatggttgaaaatgatttacattccacatatggcaaggcaacccttaaatgcatggagtaccacacaggcatttacagctccatattcctaagtcctcaaaggtccctagaattcccagcagcataccaagatgtcacatacaacccaaactgtgacagagccataggcaaccgtgtatggttccaatatggcacaaaaatgaacacaaactttaatgaacaacagtgtaagtgtgtgttaacaaacattcccctgtgggcggcctttaacggctacccagactttatagaacaagaactcggtatcagcacagaggtacacaactttggcatagtatgtttccagtgcccctacacctttcccccactctatgacaaaaagaacccagataaaggctacgtattttatgacaccacctttgggaacggaaaaatgccagacgggtcaggccacattcccatctactggcagcagagatggtggatcagactagcctttcaagtacaagtcatgcatgactttgtactcactggcccctttagctacaaagatgacctagcaaacactacactaacagccaggtacaagttcagattcaaatggggcggtaatatcatccccgaacagattatcaagaacccgtgtaagagagaacagtccctcggttcctaccccgatagacaacgtcgcgacctacaagttgttgacccatcaaccatgggcccgatctacaccttccacacatgggactggcgacgggggctttttggtgcagatgctatccagagagtgtcacaaaaaccggaagatgctctccgctttacaaaccctttcaagagacccagatatcttcccccgacagacggagaagactaccgacaagaagaagacttcgctttacaggaaagaagacggcgcacatccacagaagaagtccaggacgaggagagccccccgcaaaacgcgccgctcctacagcagcagcagcagcagcgggagctctcagtccagcacgcggagcagcagcgactcggagtccaactccgatacatcctccaagaagtcctcaaaacgcaagcgggtctccacctaaaccccctattattaggcccgccacaaacaaggtgtatatctttgagccccccagaggcctactccccatag

SEQ ID NO: 213 - DNA, 2313 bp, Torque teno virus
atggcagcctggtggtggggcaggcggagacgctggcgcaggtggaggcgccgccgcctccctcgccgccgccgctggcgacggaggagacggtggcccagaagacgcaggcggagatggccgcgcagacgcagacgtcgcagacctgctcgccgccctagaaggagacgcagacgccgaagggtaaggagacctcgccggcgccaaaaactggtactgactcagtggaaccctcagacagttagaaagtgcattatcagagggttcgtgccgctgttccagtgcagcagaactgcctaccacaggaactttgtagaccacatggacgacgtgtacaccacgggtcccttcgggggcggcacggggtccatgcttttcaccctgagcttcttctaccacgagtttaaaaagcaccactgcaagtggtccgccagcaacagagactttgacttgtgtagatacaggggcacggttctaaagttttatagacatccagacgtagactacatagtttggctgaacagaaacccccctttccaggaaaacctattagacgccatgagcagacagcccctcataatgttacagactcacaagtgcatactggtgaggagctttaaaacgcaccccaggggaccctcgtacgtcagaatgaaagttagacccccgagactacttacagacaagtggtactttcagtcagacttctgcaacgttccgcttttccagctacagtttgctcttgcggaactgcggtttccgatcggctcaccacaaacgaacaccacttgtgtaaacttcctggtgttagataacaggtaccacttatttttagataacaaaccacaacagtcagacaactcacaaagagaagagagggggcacggttatccctttaacggtagtgagggagaagctgatagactaaaattctggcacagtttgtggaatacaggcagattcctaaacaccactcacattaacaccctacagccaaacatctctaaattacaagaacataaagctgaagacacagaggcaaaaactacctataaaagtttaattaacggtaacaaaaaggtatataacgatagtcaatacatgcaaaacgtttgggcacaaaacaaaataaataccctttatgaggctatagcagaagaacaatacagaaaaatacaaaagtactataacaccacatacgggcagtaccaaaggcaactatttacaggcaagaagtactgggactacagagtaggcatgttcagtcccaccttcctaagtcccagcagactaaatccagagatgccaggtgcctacacagagatagcctataacccctggacagacgagggcacgggcaacgttgtgtgcctgcagtacctaacaaaagaaacctcagactacaagccacacgcaggtagcaaattcaccatagaggacgtacccctgtggatagccatgaatgggtacgtggacatatgtaaaaaagagggcaaagatccaggcataagactaaactgccttatgtgtataaggtgcccgtacaccaggcccaaactttacaaccccagataccccaaagaactgtttgtagtgtactcttacaactttgcccacgggcgcatgcccgggggggacaaatacatacccatggagtttaaggacaggtggtacccgtcgctcatgcaccaggaagaggtcatagaggacatagtcaggagcggcccctttgccctaaaagaccagacagagatggttacttgcatgatgaggtactcggccctgtttaactggggcggtaatattatccgcgaacaggccgtggaagacccctgtaaaaagaacacctttgcccttcccggagccagtggagtcgctcgcctactacaagtcagcaacccgatcaggcagacccccagcaccacctggcactcgtgggactggagaaggtccctctttacacaaacgggtattaaaagaatgcgcgaacaacaaccgtatgatgaaattacttatgcagggcctaagaggccaaaactcacagttcccgcaggacccaccctcgctgccggagacgcctacaactactgggaaagaaaaccgctcacctcgcccggagagacgctcccgacccagacggagacagagacagaagccccagaggaagaagcccagcaagaagaagtccaggagggcctccagctccagcagctctgggagcagcaactccagcaaaagcgacagctgggagtcatgttccagcaactcctccgactcagaacgggggcggaaatacacccggccctcgcatag

SEQ ID NO: 214 - DNA, 2313 bp, Torque teno virus
atggcagcctggtggtggggcaggcggagacgctggcgcaggtggaggcgccgccgcctccctcgccgccgccgctggcgacggaggagacggtggcccagaagacgcaggcggagatggccgcgcagacgcagacgtcgcagacctgctcgccgccctagaaggagacgcagacgccgaagggtaaggagacctcgccggcgccaaaaactggtactgactcagtggaaccctcagacagttagaaagtgcattatcagagggttcgtgccgctgttccagtgcagcagaactgcctgccacaggaactttgtagaccacatggacgacgtgtacaccacgggtcccttcgggggcggcacggggtccatgcttttcaccctgagcttcttctaccacgagtttaaaaagcaccactgcaagtggtccgccagcaacagagactttgacttgtgtagatacaggggcacggttctaaagttttatagacatccagacgtagactacatagtttggctgaacagaaacccccctttccaggaaaacctattagacgccatgagcagacagcccctcataatgttacagactcacaagtgcatactggtgaggagctttaaaacgcaccccaggggaccctcgtacgtcagaatgaaagttagacccccgagactacttacagacaagtggtactttcagtcagacttctgcaacgttccgcttttccagctacagtttgctcttgcggaactgcggtttccgatcggctcaccacaaacgaacaccacttgtgtaaacttcctggtgttagataacaggtaccacttatttttagataacaaaccacaacagtcagagaacctacaaagaaaagagagggggcacggttattcctttacgggtaatgagggagaagttgatagactaaaattctggcacagtttgtggaatacaggcagattcctaaacaccactcacattaacaccctactgccaaacatctctaaattacaagaacataaagctgaagacagacaggcaaatgctaagtataaaaatttaattaacggtaacaaaaaggtatataacgatagtcaatacatgcaaaacgtttgggaagaaaacaaaataaataccctttatgacgctatagcagaagaacaatacagaaaaatacaaaagtactataacaccacatacgggcagtaccaaaggcaactatttacaggcaagaagtactgggactacagagtaggcatgttcagtcccaccttcctaagtcccagcagactaaatccagagatgccaggtgcctacacagagatagcctataacccctggacagacgagggcacgggcaacgttgtgtgcctgcagtacctaacaaaagaaacctcagactacaagccacacgcaggtagcaaattcaccatagaggacgtacccctgtggatagccatgaacgggtacgtggacatatgtaaaaaagagggcaaagatccaggcataagactaaactgccttatgtgtataaggtgtccgtacaccaggcccaaactttacaaccccagataccccgaagaactgtttgtagtgtactcttacaactttgcccacgggcgcatgcccgggggggacaaatacatacccatggagtttaaggacaggtggtacccgtcgctcatgcaccaggaagaggtcatagaggacatagtcaggagcggcccctttgccctaaaagaccagacagagatggttacttgcatgatgaggtactcggccctgtttaactggggcggtaatattatccgcgaacaggccgtggaagacccctgtaaaaagaacacctttgcccttcccggagccagtggagtcgctcgcctactacaagtcagcaacccgatcaggcagacccccagcaccacctggcactcgtgggactggagaaggtccctctttacacaaacgggtattaaaagaatgcgcgaacaacaaccgtatgatgaaattacttatgcagggcctaagaggccaaaactcacagttcccgcagggcccaccctcgctgccggagacgcctacaactactgggaaagaaaaccgctcacctcgcccggagagacgctcccgacccagacggatacagagacagaagccccagaggaagaagcccagcaagaagaagtccaggagggcctccagctccagcagctctgggagcagcaactccagcaaaagcgacagctgggagtcatgttccagcaactcctccgactcagaacgggggcggaaatacacccggccctcgcatag

SEQ ID NO: 215 - DNA, 2313 bp, Torque teno virus
atggcagcctggtggtggggcaggcggagacgctggcgcaggtggaggcgccgccgcctccctcgccgccgccgctggcgacggaggagacggtggcccagaagacgcaggcggagatggccgcgcagacgcagacgtcgcagacctgctcgccgccctagaaggagacgcagacgccgaagggtaaggagacctcgccggcgccaaaaactggtactgactcagtggaaccctcagacagttagaaagtgcattatcagagggttcgtgccgctgttccagtgcagcagaactgcctaccacaggaactttgtagaccacatggacgacgtgtacaccacgggtcccttcgggggcggcacggggtccatgcttttcaccctgagcttcttctaccacgagtttaaaaagcaccactgcaagtggtccgccagcaacagagactttgacttgtgtagatacaggggcacggttctaaagttttatagacatccagacgtagactacatagtttggctgaacagaaacccccctttccaggaagacctattagacgccatgagcagacagcccctcataatgttacagactcacaagtgcatactggtgaggagctttaaaacgcaccccaggggaccctcgtacgtcagaatgaaagttagacccccgagactacttacagacaagtggtactttcagtcggacttctgcaacgttccgcttttccagctacagtttgctcttgcggaactgcggtttccgatcggctcaccacaaacgaacaccacttgtgtaaacttcctggtgttagataacaggtaccacttatttttagataacaaaccacaacagtcagacaacccacaaagaaaagagagggggcacggttattcctttacgggtaatgagggagaaatggatagagaaagattctggcacagtttgtggagtacaggcagattcctaaacaccactcacattaacaccctactgccaaacatctctaaattacaagaccataaagctgaagacaaagacgcaaaaactacctataaaagtttaattaacgataacaaaaaggtatataacgatagtcaatacatgcaaaacgtttgggaccaaaacaaaatacataccctttatatggctatagcagaagaacaatacagaaaaatacaaaagtactataacaccacatacgggcagtaccaaaggcaactatttacaggcaagaagtactgggactacagagtaggcatgttcagtcccaccttcctaagtcccagcagactaaatccagagatgccaggtgcctacacagagatagcctataacccctggacagacgagggcacgggcaacgttgtgtgcctgcagtacctaacaaaagaaacctcagactacaagccacacgcaggtagcaaattcaccatagaggacgtacccctgtggatagccatgaacgggtacgtggacatatgtaaaaaagagggcaaagatccaggcataagactaaactgccttatgtgtataaggtgtccgtacaccaggcccaaactttacaaccccagataccccgaagaactgtttgtagtgtactcttacaactttgcccacgggcgcatgcccgggggggacaaatacatacccatggagtttaaggacaggtggtacccgtcgctcatgcaccaggaagaggtcatagaggacatagtcaggagcagcccctttgccctaaaagaccagacagagatggttacttgcatgatgaggtactcggccctgtttaactggggcggtaatattatccgcgaacaggccgtggaagacccctgtaaaaagaacacctttgcccttcccggagccagtggagtcgctcgcctactacaagtcagcaacccgatcaggcagacccccagcaccacctggcactcgtgggactggagaaggtccctctttacacaaacgggtattaaaagaatgcgcgaacaacaaccgtatgatgaaattacttatgcagggcctaagaggccaaaactcacagttcccgcagggcccaccctcgctgccggagacgcctacaactactgggaaagaaaaccgctcacctcgcccggagagacgctcccgacccagacggagacagagacagaagccccagaggaagaagcccagcaagaagaagtccaggagggcctccagctccagcagctctgggagcagcaactccagcaaaagcgacagctgggagtcatgttccagcaactcctccggctcagaacgggggcggaaatacacccggccctcgcatag

SEQ ID NO: 216 - DNA, 2313 bp, Torque teno virus
atggcagcctggtggtggggcaggcggagacgctggcgcaggtggaggcgccgccgcctccctcgccgccgccgctggcgacggaggagacggtggcccagaagacgcaggcggagatggccgcgcagacgcagacgtcgcagacctgctcgccgccctagaaggagacgcagacgccgaagggtaaggagacctcgccggcgccaaaaactggtactgactcagtggaaccctcagacagttagaaagtgcattatcagagggttcgtgccgctgttccagtgcagcagaactgcctaccacaggaactttgtagaccacatggacgacgtgtacaccacgggtcccttcgggggcggcgcggggtccatgcttttcaccctgagcttcttctaccacgagtttaaaaagcaccactgcaagtggtccgccagcaacagagactttgacttgagtagatacaggggcgcggttctaaagttctatagacatccagacgtagactacatagtttggctgaacagaaacccccctttccaggaaaacctattagacgccatgagcagacagcccctcataatgttacagactcacaagtgcatactggtgaggagctttaaaacgcaccccaggggaccctcgtacgtcagaatgaaagttagacccccgagactacttacagacaagtggtactttcagtcagacttctgcaacgttccgcttttccagctacagtttgctcttgcggaactgcggtttccgatcggctcaccacaaacgaacaccacttgtgtaaacttcctggtgttagacaacaggtaccactcatttttagataacaaaccacaacagtcagagaactcacaaagaaaagagagggggcacggttattcctttacgggtaaagagggagaacaggatagactaacattctggcagagtttgtggaatacaggcagattcctaaacaccactcacattaacaccctactgccaaacatctctaaattacaagaccataaagctgaagacacagacgcaaatcctgactataaaagtttaattaacggtaacaaaaaggtatataacgatagtcaatacatgcaaaacgtttggcaacaaggcaaaataaataccctttgtaacgctatagcacaggaacaatacagaaaaatacaaaagtactataacaccacatacgggcagtaccaaaggcaactatttacaggcaagaaatactgggactacagagtaggcacgttcagtcccaccttcctaagtcccagcagactaaatccagagatgccaggtgcctacacagagatagcctataacccctggacagacgagggcacgggcaacgttgtgtgcctgcagtacctaacaaaagaaacctcagactacaagccacacgcaggtagcaaattcaccatagaggacgtacccctgtggatagccatgaacgggtacgtggacatatgtaaaaaagagggcaaagatccaggcataagactaaactgccttatgtgtataaggtgtccgtacaccaggcccaaactttacaaccccagataccccgaagaactgtttgtagtgtactcttacaactttagccacgggcgcatgcccgggggggacaaatacatacccatggagtttaaggacaggtggtacccgtcgctcatgcaccaggaagaggtcatagaggacatagtcaggagcggcccctttgccctaaaagaccagacagacatggttacttgcatgatgaggtactcggccctgtttaactggggcggtaatattatccgcgaacaggccgtggaagacccctgtaaaaagaacacctttgcccttcccggagccagtggagtcgctcgcctactacaagtcagcaacccgatcaggcagacccccagcaccacctggcactcgtgggactggagaaggtccctctttacacaaacgggtattaaaagaatgcgcgaacaacaaccgtatgatgaaattacttatgcagggcctaagaggccaaaactcacagttcccgcagggcccaccctcgctgccggagacgcctacaactactgggaaagaaaaccgctcacctcgcccggagagacgctcccgacccagacggagacagagacagaagccccagaggaagaagcccagcaagaagaagtccaggagggcctccagctccagcagctatgggagcagcaactccagcaaaagcgacagctgggagtcatgttccagcaactcctccgactcagaacgggggcggaaatacacccggccctcgcatag

SEQ ID NO: 217 - DNA, 2313 bp, Torque teno virus
atggcagcctggtggtggggcaggcggagacgctggcgcaggtggaggcgccgccgcctccctcgccgccgccgctggcgacggaggagacggtggcccagaagacgcaggcggagatggccgcgcagacgcagacgtcgcagacctgctcgccgccctagaaggagacgcagacgccgaagggtaaggagacctcgccggcgccaaaaactggtactgactcagtggaaccctcagacagttagaaagtgcattatcagagggttcgtgccgctgttccagtgcagcagaactgcctaccacaggaactttgtagaccacatggacgacgtgtacaccacgggtcccttcgggggcggcacggggtccatgcttttcaccctgagcttcttctaccacgagtttaaaaagcaccactgcaagtggtccgccagcaacagagactttgacttgtgtagatacaggggcacggttctaaagttttatagacatccagacgtagactacatagtttggctgaacagaaacccccctttccaggaaaacctattagacgccatgagcagacagcccctcataatgttacagactcacaagtgcatactggtgaggagctttaaaacgcaccccaggggaccctcgtacgtcagaatgaaagttagacccccgagactacttacagacaagtggtactttcagtcagacttctgcaacgttccgcttttccagctacagtttgctcttgcggaactgcggtttccgatcggctcaccacaaacgaacaccacttgtgtaaacttcctggtgttagataacaggtaccacttatttttagataacaaaccacgacagtcagagaacttacaaagaaaagagagggggcacggttatgtctttacgggtaatgagggagaagatgatagactaaaattctggcacagtttgtggagtacaggcagattcctaaacaccactcacattaacaccctactgccaaacatctctaaattacaagaccatgaagctgaagacacacaggcaaaaactgactataaaagtttaattaacggtaacaaaaaggtatataacgatagtcaatacatgcaagacgtttgggaacaaaagaaaatacaaaccctttataaggttatagcagaagaacaatacagaaaaatagaaaagtactataacaccacatacgggcagtaccaaaggcaactatttacaggcaagaagtactgggactacagagtaggcatgttcagtcccaccttcctaagtcccagcagactaaatccagagatgccaggtgcctacacagagatagcctataacccctggacagacgagggcacgggcaacgttgtgtgcctgcagtacctaacaaaagaaacctcagactacaagccacacgcaggtagcaaattcaccatagaggacgtacccctgtggatagccatgaacgggtacgtggacatatgtaaaaaagagggcaaagatccaggcataagactaaactgccttatgtgtataaggtgtccgtacaccaggcccaaactttacaaccccagataccccgaagaactgtttgtagtgtactcttacaactttgcccacgggcgcatgcccgggggggacaaatacatacccatggagtttaaggacaggtggtacccgtcgctcatgcaccaggaagaggtcatagaggacatagtcaggagcggcccctttgccctaaaagaccagacagagatggttacttgcatgatgaggtactcggccctgtttaactggggcggtaatattatccgcgaacaggccgtggaagacccctgtaaaaagaacacctttgcccttcccggagccagtggagtcgctcgcctactacaagtcagcaacccgatcaggcagacccccagcaccacctggcactcgtgggactggagaaggtccctctttacacaaacgggtattaaaagaatgcgcgaacaacaaccgtatgatgaaattacttatgcagggcctaagaggccaaaactcacagttcccgcagggcccaccctcgctgccggagacgcctacaactactgggaaagaaaaccgctcacctcgcccggagagacgctcccgacccagacggagacagagacagaagccccagaggaagaagcccagcaagaagaagtccaggagggcctccagctccagcagctctgggagcagcaactccagcaaaagcgacagctgggagtcatgttccagcaactcctccgactcagaacgggggcggaaatacacccggccctcgcatag

SEQ ID NO: 218 - DNA, 2211 bp, Torque teno virus
atggctgcctggtggtggggcaggaggcggcgatggcgccggtggagacggcgccgtctccctcgccgccgccgctggcgacggaggagacggtggcccaggaggcgtaggcggagatggccgcggagacgcagacgtcgcggacctgctcgccgccttagaaggagacgtcgacgcagaagggtaaggagacctcgccggcgccaaaaactcgtactgactcagtggaacccccagacccagagaaagtgcgtggtcagggggtttctgcccctgttcttttgcggacagggagcctatcacagaaactttgtggaacacatggacgacgtgttccccaagggaccctcgggagggggctttggcagcatggtgtggaacctagattttttgtaccaagagtttaaaaagcatcacaacaagtggtcttccagcaacagggactttgacctagtgaggtgccacggcacggtgattaaattctacagacactctgactttgactacctggtgcacgtcaccaggacccctcctttcaaggaggacctcctcaccatcgtcagccaccagccggggctcatgatgcagaactacaggtgcatactcgtaaagagttacaagacgcaccccggggggcgaccctacataacacctaaaataaggccccccagactcctgacggacaagtggtactttcggcccgacttctgcggagttcctcttttcaaactgtacgttactcttgcagagttgcggtttccgatctgctcaccacaaactgacaccaattgtgtcaccttcctggtgttagacaacacctactacgactacttagacaatactgcagacaccactagagaccatgaaagacagcagaaatggacaaacatgaaaatgacacccagataccatctcaccagtcacataaatacattgtttagtggaacacaacagatgcaaagcgcaaaagaaacaggcaaagacagtcagtttagagaaaacatctggaaaacagctgaggttgttaaaattattaaagatatagcctcaaaaaacatgcaaaaacaacaaacctactacacaaaaacctatggcgcctatgccacccagtattttactggaaaacaatactgggactggagggtgggcctgttcagccccatattcctcagtcccagcagactgaacccacaagagccaggggcctacacagaaatagcttacaatccatggactgacgagggcacgggcaacatagtgtgcattcagtacctaacaaagaaagacagtcactacaagccgggtgccggtagcaaattcgcagtgacggacgttcccctgtgggccgccctgttcgggtactacgaccagtgtaagaaagaaagcaaagacgcgaacataagactaaaccgcttgctgttagtcaggtgcccttacaccaggcctaaactgtacaatcccagagacccggaccaactgtttgtaatgtacagctacaactttgggcacggacgcatgccggggggcgacaagtacgtgcccatggaatttaaggacaggtggtacccgtgcatgctgcaccaagaagaagtagtggaggagatagtaaggtgcgggccctttgctcccaaagacatgactccctcggtaacatgcatggccagatactcatccctgttcacctgggggggcaatatcattcgcgaacaggccgtggaggacccctgtaaaaaatccacgtttgccattcccggagccggtggactcgctcgcattctacaagtcagcaacccgcagaggcaagcccccaccaccacctggcactcgtggggctggcgccgatccctctttacagagacgggtcttaagcgaatgcaggaacaacaaccttacgatgaaatgtcctatacaggccctaaaaggccaaaactgtctgttcccccagcagcagaaggaaacctcgctgcaggaggaggcttattcttcagggacggaaaacagcctgcctcgccaggaggcagtctcccgacgcagtcggagacagaagcagaagccgaagacgaagaagcccaccaagaagagacggaggagggagcgcagctccagcagctctgggagcagcaactccaacagaagcgagagctgggaatcgttttccaacacctcctccgactccgacagggggcggaaatccacccgggcctcgtataa

SEQ ID NO: 219 - DNA, 2211 bp, Torque teno virus
atggctgcytggtggtggggcaggaggcggcgatggcgccggtggagacggcgccgtytccctcgccgccgccgctggcgacggaggagacggtggcccaggaggcgtaggcggagatggccgcggagacgcagacgtcgcagacctgctcgccgccttagaaggagacgtcgacgcagaagggtaaggagacctcgccggcgccaaaaactcgtactgactcagtggaacccccagacccagagaaagtgcgtggtcagggggtttctgcccctgttcttctgcggacagggagcctatcacagaaactttgtggaacacatggacgacgtgttccccaagggaccctcgggagggggctttggcagcatggtgtggaacctagattttttgtaccaagagtttaaaaagcatcacaacaggtggtcttccagcaacagggactttgacctagtgaggtaccacggcacggtgattaaattctacagacactctgactttgactacctggtgcacgtcaccaggacccctcctttcaaggaggacctcctcaccatcgtcagccaccagccggggctcatgatgcagaactacaggtgcatactcgtaaagagttacaagacgcaccccggggggcgaccctacataacacttaaaataaggccccccagactcctgacggacaagtggtactttcagcccgacttctgcggagttcctcttttcaaactgtacgttactcttgcagagttgcggtttccgatctgctcaccacaaactgacaccaattgtgtcaccttcctggtgttagacaacacctactacgactacttagacagtactgcagacaccactagagacaatgaaagacaccagaaatggaaaaacatgataatgacacccagataccatctcaccagtcacataaatacattgtttagtggaacacaacagatgcaaaacgcaaaagaaacaggcaaagacagtcagtttagagaaaacatctggaaaacagaagaggttgttaaaattattcacgatatagcctctagaaacatgcaaaaacaaataacctactacacaaaaacctatggcgcctatgccacccagtattttactggaaaacaatactgggactggagggtgggcctgttcagccccatattcctcagtcccagcagactgaacccacaagagccaggggcctacacagaaatagcttacaatccatggactgacgagggcacgggcaacatagtgtgcattcagtacctaacaaagaaagacagtcactacaagccgggtgccggtagcaaattcgcagtgacggacgttcccctgtgggccgccctgttcgggtactacgaccagtgtaagaaagaaagcaaagacgcgaacataagactaaactgcttgctgttagtcaggtgcccttacaccaggcctaaactgtacaatcccagagacccggaccaactgtttgtaatgtacagctacaactttgggcacggacgcatgccggggggcgacaagtacgtgcccatggaatttaaggacaggtggtacccgtgcatgctgcaccaagaagaagtagtggaggagatagtaaggtgcgggccctttgctcccaaagacatgactccctcggtaacatgcatggccagatactcatccctgttcacctgggggggcaatatcattcgcgaacaggccgtggaggacccctgtaaaaaatccacgtttgccattcccggagccggtggactcgctcgcattctacaagtcagcaacccgcagaggcaagcccccacgaccacgtggcacttgtgggactggcgccgatccctctttacagagacgggtcttaagcgaatgcaggaacaacaaccttacgatgaaatgtcttatacaggccctaaaaggccaaaactgtccgttcccccagcagcagaaggaaacctcgctgcaggaggaggcttattcttccgggacagaaaacagcccacctcgccaggaggcagtctcccgacgcagtcggagacagaagcagaagcggaagacgaagaagcccaccaagaagagacggaggagggagcgcagctccagcagctctgggagcagcaactccaacagaagcgagagctgggaatcgttttccaacacctcctccgactccgacagggggcggaaatccacccgggcctcgtataa

SEQ ID NO: 220 - DNA, 2202 bp, Torque teno virus
atggcatggtggtggtggagaaggagacgccgcccgtggagaaggcgctggcgctggaagagacgagcccgagtacgaaccaggagacctagacgcgctgttcgccgccgtcgaagaagagtaaggaggcggaggagggggtggaggagactatacagacgatggcgacgaaagggcagacgcagacgcagacgcaaaaagttagtaatgaaacagtggaacccctccactgtcagcagatgctatattgttggatacctgcctattattattatgggacaggggactgcatccatgaactatgcatctcactcagacgacgtgtactaccccggaccgtttggggggggaataagctctatgaggtttactttaagaatactgtatgaccagtttatgagaggacagaacttctggactaagacaaacgaggacttggacctagctagatttctaggcagcaaatggaggttctatagacacaaagatgtggactttatagtgacttacgagacctcagccccctttacagactccctagagtcaggaccacaccaacacccaggcatacagatgctaatgaaaaacaaaatactaatccctagctttgccaccaaaccaaaaggaaggtctagcattaaagttagaatacagcccccaaagctaatgatagacaagtggtacccacaaactgacttctgtgaagtaacgctgctaaccatacatgcaaccgcctgcaacttgcggtttccgttctgctcaccacaaactgacacttcctgtgttcagtttcaagtgttgtcatacaacgcttacaggcagagaatttcaatacttcctgaattatgtactagagaaaagcttagggagtttattaaacaagtagtaaaaccaaatttaacatgcataaacactctagctactccatggtgctttaaattcccagagctagacaaactaccaccagtggcaaacaatgcaacaggctggtcagttaacccagatagcggagacggagatgtaatataccaggaaactacattagaaaccaaatggattgctaacaatgatgtgtggcatacaaaagaccaaagagcacacaacaacatacatagccaatatggcatgccacaatcagacgcattagaacacaaaacaggttacttcagtccagcattattaagcccacaaagactaaacccacagataccaggcctatacataaacatagtctacaatccactaacagacaaaggagaaggcaacaaaatttggtgtgacccactaacaaaaaacacatttggctatgatccccctaaaagtaaattccttatagaaaatctgccactgtggtctgcagtaacaggatacgtagactactgcacgaaagccagcaaagatgaaagctttaaatacaactacagagtacttatccagaccccatacacagtaccagcactatacagtgactctgaaaccaccaaaaacagaggctacattcccataggcacagactttgcatacggccgcatgcctgggggagtacaacaaataccaattagatggagaatgaggtggtaccccatgctatttaatcaacaaccagtactagaagacctattccagtcaggcccctttgcataccaaggagatgctaaatcagccacactagtcggcaaatatgcctttaaatggctatggggtggcaatcgtatcttccaacaggtggtcagagacccgcgctcacaccagcaagaccaatcagttggtcccagtagacagcctagagcagtacaagtctttgacccgaagtaccaagcaccacaatggacattccacgcgtgggacatcagacgtggtctgtttggcagacaggctattaaaagagtgtcagcaaaaccaacacctgatgagcttatatcaacaggcccaaaaagacctcggctggaagtccccgcgttccaagaagagcaagaaaaagacttacttttcagacagagaaaacacaaagcctgggaggacacaacggaggaagagacagaagccccctcagaagaggaggaagagaaccaagagctccagctcgtcagacgcctccagcagcaacgagagctgggacgaggcctcagatgcctcttccagcaactaacccgcacacagatggggctgcatgtagacccccaactattggcccctgtataa

SEQ ID NO: 221 - DNA, 2235 bp, Torque teno virus 10
atggcatggggatggtggaaacgaaggcgcaagtggtggtggagacgacgctggactcgtggccgacttcgcaaacgacgggctagacgagctggtcgccgccctcgacgaagaagagtaaggagacggagggcttggaggcgtgggcgacgaaagagacggactttcagacgcagacgcagacgaaagggtaggagacacagaaccagacttataataagacaatggcagccagaaatagtgagaaagtgcctcataataggctactttcccatgattatatgtggccagggacgctggtcagagaactacagcagccacctagaggaccgtgtagtaaaacaggccttcggtgggggacacgcgactaccaggtggtctctaaaagtactgtacgaggagaacctcagacacttgaacttttggacctggactaacagagacttagaactggccaggtacctcaaagtgacgtggaccttttacagacaccaagatgtagactttataatatactttaacagaaagagccccatgggaggcaacatatacacagcacccatgatgcatccgggagccctaatgctcagcaaacacaagatactagtaaaaagctttaaaacaaaacccaagggcaaagcaacagttaaagtgactattaagccccccactctactagtagacaagtggtactttcaaaaggacatttgcgacatgacactgttaaacctcaatgccgttgcggctgacttgcggtttccgttctgctcaccacaaactgacaacccttgcatcaacttccaggttctgtcctcagtgtataacaacttcctctctataactgacaatagactaacaccagtcacagatgatggccaggcttattataaagcttttctagacgctgcatttaccaaagacagagactttaatgctgttaatacgtttagaacaatatctaacttttcccacccacaactagaacttccaactaaaaccaccaacacatcccaagatcaatactttaacactctagatgggtactggggagaccccatatatgtacacacacaaaatataaaacctgaccaaaaccttgataaatgcaaagaaatacttacaaacaacatgaaaaactggcataaaaaagtaaagtcagaaaacccaagtagcctgaaccacagctgctttgcccacaatgtaggcatattcagcagctcattcctatccgcaggcagactagcaccagaagttccaggcctgtacacagatgttatttacaacccatacacagacaagggaaagggaaacatgctatgggtggattactgtagcaaaggagacaacctatacaaagaaggccaaagcaagtgtctacttgccaacctacccctctggatggccacaaacggttatatagactgggtaaaaaaagaaacagataactgggttataaacactcaagccagagtactcatggtatgtccctacacttacccaaaactataccatgaaatacagccattatatggctttgtagtatactcatataactttggagagggaaaaatgccaaacggggccacatacataccctttaagtttagaaacaagtggtatccaaccatatacatgcagcaagcagtactagaagatatatccagatcgggcccctttgcacttaaacaacagatacccagcgccacacttactgccaaatacaaattcaaattcttatttggcggtaaccctacttctgaacaggttgttagagacccctgcactcagcccaccttcgaactgcccggagccagtacgcagcctccacgaatacaagtcacggacccgaaactcctcggtccccactactcattccactcgtgggacctcagacgtggctactatagcacaaagagtattaaacgaatgtcagaacacgaagaaccttctgagtttattttcccaggtcccaaaaaacccagggtcgacctcgggccaatccaacagcaagaaaggccctccgattcactccaaagagaatcgaggccgtgggagaccagcgaagaagagagcgaagcagaagtccagcaagaagagacggaggaggtgcccctcagacagcaactcctccacaacctcagagagcagcagcaactccgaaagggcctccagtgcgtcttccagcagctaataaagacgcagcagggggttcacatagacccatccctactgtag

SEQ ID NO: 222 - DNA, 660 bp, Torque teno virus
atggcgtggtcgtggtggtggaggcgacggaaacgctggtggccgcgcagaaggaggcgatggaggagatttcgcacccgaagagctagacgagctgttccgcgccgtcgccgccgacgaagagtaaggaggcgccggtgggggaggcgaggacgtaggagacgggttttttataagagacgcagacgaaagactggcagactgtacagaaagcccaaaaagaaactagtactgactcagtggcaccccactaccgtccgcaactgctccatccgaggccttgtgcctctagtactctgcggacacactcagggcggcagaaactttgctctcaggagcgatgactaccccaagcaggggtctccttacggaggcagttttagcactacaacctggaacttgagggtcctttttgacgaacaccaaaaacaccacaacacgtggagctaccccaataaccagctagacctgggcagatacaagggctgcaccttctgcttttacagaggcaaaaagacggactacatagtaaagtttcagaggaggggaccctttaaaataaacaagtacagcagtcccatggcccatccgggcatgatgatgctagataagatgaaaatcctggtgcccagctttgataccaggcccgggggtcgctga

SEQ ID NO: 223 - DNA, 660 bp, Torque teno virus; identical to SEQ ID NO: 222

SEQ ID NO: 224 - DNA, 660 bp, Torque teno virus
atggcgtggtcgtggtggtggaggcgacggaaacgctggtggccgcgcagaaggaggcgatggaggagatttcgcacccgaagagctagacgagctgttccgcgccgtcgccgccgacgaagagtaaggaggcgccggtgggggaggcgaagacgtaggagacgggttttttataagagacgcagacgaaagactggcagactgtacagaaagcccaaaaagaaactagtactgactcagtggcaccccactaccgtccgcaactgctccatccgaggccttgtgcctctagtactctgcggacacactcagggcggcagaaactttgctctcaggagcgatgactaccccaagcaggggtctccttacggaggcagttttagcactacaacctggaacttgagggtcctttttgacgaacaccaaaaacaccacaacacgtggagctaccccaataaccagctagacctgggcagatacaagggctgcaccttctacttttacagagacaaaaagacagactacatagtaaagtttcagaggaggggaccctttaaaataaacaagtacagcagtcccatggcccatccgggcatgatgatgctagataagatgaaaatcctggtgcccagctttgataccaggcccgggggtcgctga

SEQ ID NO: 225 - DNA, 660 bp, Torque teno virus; identical to SEQ ID NO: 224

SEQ ID NO: 226 - DNA, 1410 bp, Torque teno virus
atgtactatggctgcataggaattaattccactttaacaaccaagtatgaaaacttatttaataaactatattccaaatgctgctactttgaaacctttcaaacaatagcccagctaaatcctggctttaaagctgctaaaaagactactaatggttctggttctacagctgcaacactaggagacgcagtaactgaacttaaaaacccaaatggtactttttacacaggcaacaatagcacctttggctgctgcacatataaacccactaaacaaataggtagtaatgccaataagtggttctggcatcagttaacagccacagattcagacacactaggccaatacggccgtgcctccattcagtatatggagtaccacacaggcatttacagctcaatttttcttagcccactaagaagcaatctagaactccctacagcataccaagatgtaacatataatccactaactgacagaggtataggtaacagaatctggtaccagtacagtaccaaagaaaacactacatttaatgaaacacagtgcaaatgtgtactatcagacttgccactgtggagcatgttttatggctatgtagattttatagagtcagaactaggcatctcagcagagatacacaactttggcatagtatgtgtccagtgcccctacacgtttcccccaatgtttgacaaatccaaaccagataaaggctacgtgttctatgacaccctttttggcaacggaaagatgccagacgggagcggacacgtacccacctactggcagcagaggtggtggcccagattcagcttccagagacaagtgatgcacgacattatcctcaccgggcccttcagctacaaagatgactctgtaatgactggcataaccgcaggctacaagtttaaattctcatggggcggtgatatggtctccgaacaggtcattaaaaacccagagagaggggacggacgagactccacctatcccgatagacagcgccgcgactcacaagttgttgacccacgctccatgggcccccaatgggtgttccacacctttgactacagacgggggctttttggaaaggacgctattaagcgagtgtcagaaaaaccgacagatcctgactactttacaacaccttacaaaaaaccaagatttttccctccaacagcaggagaagaaaaactgcaagaagaagactccgctttacaggagaaaagaagcccgctctcgtcagaagaggggcagacgagggcgcaagtcctccagcagcaggtcctccagtcggagctccagcagcagcaggagctcggggagcagctcagattcctcctcagggaaatgttcaaaacccaagcgggcatacacatgaacccccgcgcatttcaggagctgtaa

SEQ ID NO: 227 - DNA, 1410 bp, Torque teno virus; identical to SEQ ID NO: 226

SEQ ID NO: 228 - DNA, 1410 bp, Torque teno virus
atgtactatgactgcataggaattaattccactttaacaaccaagtatgaaaacttatttaataaactatattccaaatgctgctactttgaaacctttcaaacaatagcccagctaaatcctggctttaaagctgctaaaaagactactaatggttctggttctacagctgcaacactaggagacgcagtaactgaacttaaaaacccaaatggtactttttacacaggcaacaatagcacctttggctgctgcacatataaacccactaaacaaataggtagtaatgccaataagtggttctggcatcagttaacagccacagattcagacacactaggccaatacggccgtgcctccattcagtatatggagtaccacacaggcatttacagctcaatttttcttagcccactaagaagcaatctagaattccctacagcataccaagatgtaacatataatccactaactgacagaggtataggtaacagaatctggtaccagtacagtaccaaagaaaacactacatttaatgaaacacagtgcaaatgtgtactatcagacttgccactgtggagcatgttttatggctatgtagattttatagagtcagaactaggcatctcagcagagatacacaactttggcatagtatgtgtccagtgcccctacacgtttcccccaatgtttgacaaatccaaaccagataaaggctacgtgttctatgacaccctttttggcaacggaaagatgccagacgggagcggacacgtacccacctactggcagcagaggtggtggcccagattcagcttccagagacaagtgatgcacgacattatcctcaccgggcccttcagctacaaagatgactctgtaatgactggcataaccgcaggctacaagtttaaattctcatggggcggtgatatggtctccgaacaggtcattaaaaactcagagagaggggacggacgagactccacctatcccgatagacagcgccgcgacttacaagttgttgacccacgctccatgggcccccaatgggtattccacacctttgactacagacgggggctttttggaaaggacgctattaagcgagtgtcagaaaaaccgacagatcctgactactttacaacaccttacaaaaaaccaagatttttccctccaacagcaggagaagaaaaactgcaagaagaagactccgctttacaggagaaaagaagcccgctctcgtcagaagaggggcagacgagggcgcaagtcctccagcagcaggtcctccagtcggagctccagcagcagcaggagctcggggagcagctcagattcctcctcagggaaatgttcaaaacccaagcgggcatacacatgaacccccgcgcatttcaggagctgtaa

SEQ ID NO: 229 - DNA, 1410 bp, Torque teno virus; identical to SEQ ID NO: 228

SEQ ID NO: 230 - protein, 770 aa, Torque teno virus
MAYGWWRRRRRRWRRWRPRPWRPRWRTRRRRPARRRGHRRNVRRRRRGGRWRRRYRRWKRKGRRRKKAKIIIRQWQPNYRRRCNIVGYIPVLICGENTVSRNYATHSDDTNYPGPFGGGMTTDKFTLRILYDEYKRFMNYWTASNEDLDLCRYLGVNLYFFRHPDVDFIIKINTMPPFLDTELTAPRLHPGMLALDKRARWIPSLKSIPGKKHYIKIRVGAPKMFTDKWYPQTDLCDMVLLTVYATAADIPYPFGSPLTDSVVVNFQVLQSMYDKYISILPDQKSQSKSLLSNIANYIPFYNTTQTIAQLKPFIDAGNITSGTAATTWGSYINTTKFTTTATTTYTYPGTTTNTVTMYSSNDSWYRGTVYNNQIKELPKKAAELYSKATKTLLGNTFTTEDCTLEYHGGLYSSIWLSPGRSYFETPGAYTDIKYNPFTDRGEGNMLWIDWLSKKNMNYDKVQSKCLVSDLPLWASAYGYVEFCAKSTGDQNIHMNARLLIRSPFTDPQLLVHTDPTKGFVPYSLNFGNGKMPGGSSNVPIRMRAKWYPTLFHQQEVLEALAQSGPFAYHSDIKEVSLGMKYRFKWIWGGNPVRQQVVRNPCKETHSSGNRVPRSLQIVDPKYNSPELTFHTWDFRRGLFGPKAIQRMQQQPTTTDIFSAGRKRPRRDTEVYHSSQEGEQKESLLFPPVKLLRRVPPWEDSQQEESGSQSSEEETQTVSQQLKQQLQQQQILGVKLRLLFDQVQKIQQNQDINPTLLPRGGDLASLFQIAP

SEQ ID NO: 231 - protein, 770 aa, Torque teno virus
MAYGLWRRRRRRWKRWRRRRWRRRWRTRRRRPAGRRRRRRTVRRRRRRGRWRRRYRRWRRKGRRRKKKKLIIRQWQPNYTRKCNIVGYMPVIMCGENTVSRNYATHSDDTNYPGPFGGGMTTDKFTLRILYDWYKRFMNYWTASNEDLDLCRYLGVNLYFFRHPDVDFIIKINTMPPFLDTELTAPSIHPGMLALDERARWIPSLKSRPGKKHYIKIRVGAPKMFTDKWYPQTDLCDMVLLTVYATAADMQYPFGYPLTDSVVVNFQVLQSMYDKYISILPDQKSQRESLLSNIANYIPFYNTTQTIAQLKPFIDAGNITSGTTATTWGSYINTTKFTTTATTTYTYPGTTTNTVTMLTSNDSWYRGTVYNNQIKELPKKAAELYSKATKTLLGNTFTTEDCTLEYHGGLYSSIWLSPGRSYFETPGAYTDMKYNPFTDRGEGNMLWIDWLSKKNMNYDKVQSKCLVSDLPLWAAAYGYLEFCSKSTGDTNIHMNARLLIRSPFTDPQLIAHTDPTKGFVPYSLNFGNGKMPGGSSNVPIRMRAKWYPTLFHQQEVLEALAQSGPFAYHSDIKKVSLGIKYRFKWIWGGNPVRQQVVRNPCKEPHSSVNRVPRSIQIVDPKYNSPELTIHAWDFRRGFFGPKAIQRMQQQPTATEFFSAGRKRPRRDTEVYQSDQEKEQKESSLFPPVKLLRRVPPWEDSEQEQSGSQSSEEETHTVSQQLKQQLQQQRILGVKLRVLFHQVHKIQQNQHINPTLLPRGGALASLSQIAP

SEQ ID NO: 232 - protein, 770 aa, Torque teno virus
MAYGLWHRRRRRWRRWKRTPWKRRWRTRRRRPARRRGRRRNVRRRRRGGRWRRRYRRWKRKGRRRKKAKIIIRQWQPNYRRRCNIVGYIPVLICGENTVSRNYATHSDDTNYPGPFGGGMTTDKFTLRILCDEYKRFMNYWTASNEDLDLCRYLGVNLYFFRHPDVDFIIKINTMPPFLDTELTAPSIHPGMLALDKRARWIPSLKSRPGKKHYIKIRVGAPKMFTDKWYPQTDLCDMVLLTVYATTADMQYPFGSPLTDSVVVNFQVLQSMYDKTISILPDEKSQREILLNKIASYIPFYNTTQTIAQLKPFIDAGNVTSGATATTWASYINTTKFTTATTTTYAYPGTNRPPVTMLTCNDSWYRGTVYNTQIQQLPIKAAKLYLEATKTLLGNNFTNEDYTLEYHGGLYSSIWLSPGRSYFETTGAYTDIKYNPFTDRGEGNMLWIDWLSKKNMNYDKVQSKCLVRDLPLWAAAYGYVEFCAKSTGDKNIYMNARLLIRSPFTDPQLLVHTDPTKGFVPYSLNFGNGKMPGGSSNVPIRMRAKWYPTLFHQQEVLEALAQSGPFAYHSDIKKVSLGMKYRFKWIWGGNPVRQQVVRNPCKETHSSGNRVPRSLQIVDPKYNSPELTFHTWDFRRGLFGPRAIQRMQQQPTTTDILSAGRKRPRKDTEVYHPSQEGEQKESLLFPPVKLLRRVPPWEDSQQEESGSQSSEEETQTVSQQLKQQLQQQQILGVKLRLLFDQVQKIQQNQDINPTLLPRGGDLASLFQIAP

SEQ ID NO: 233 - protein, 770 aa, Torque teno virus
MAYGWWRRRRRRWRRWRRRPWRRRWRTRRRRPARRRGRRRNVRRRRRGGRWRRRYRRWKRKGRRRKKAKIIIRQWQPNYRRRCNIVGYIPVLICGENTVSRNYATHSDDTNYPGPFGGGMTTDKFTLRILYDEYKRFMNYWTASNEDLDLCRYLGVNLYFFRHPDVDFIIKINTMPPFLDTELTAPSIHPGMLALDKRARWIPSLKSRPGKKHYIKIRVGAPKMFTDKWYPQTDLCDMVLLTVYATAADMQYPFGSPLTDSVVVNFQVLQSMYDEKISILPDQKSQRESLLTSIANYIPFYNTTQTIAQLKPFIDAGNVTSGTTATTWGSYINTTKFTTTATTTYTYPGTTTTTVTMLTSNDSWYRGTVYNNQIKDLPKKAAELYSKATKTLLGNTFTTEDYTLEYHGGLYSSIWLSPGRSYFETPGAYTDIKYNPFTDRGEGNMLWIDWLSKKNMNYDKVQSKCLISDLPLWAAAYGYVEFCAKSTGDQNIHMNARLLIRSPFTDPQLLVHTDPTKGFVPYSLNFGNGKMPGGSSNVPIRMRAKWYPTLFHQQEVLEALAQSGPFAYHSDIKKVSLGMKYRFKWIWGGNPVRQQVVRNPCKETHSSGNRVPRSLQIVDPKYNSPELTFHTWDFRRGLFGPKAIQRMQQQPTTTDIFSAGRKRPRRDTEVYHSSQEGEQKESLLFPPVKLLRRVPPWEDSQQEESGSQSSEEETQTVSQQPKQQLQQQRILGVKLRLLFNQVQKIQQNQDINPTLLPRGGDLASLFQVAP

SEQ ID NO: 234 - protein, 770 aa, Torque teno virus
MAYGWWRRRRRRWRRWRRRPWRRRWRTRRRRPARRRGRRRNVRRRRRGGRWRRRYRRWKRKGRRRKKAKIIIRQWQPNYRRRCNIVGYIPVLICGENTVSRNYATHSDDTNYPGPFGGGMTTDKFTLRILYDEYKRFMNYWTASNEDLDLCRYLGVNLYFFRHPDVDFIIKINTMPPFLDTELTAPSIHPDMLALDKRARWIPSLKSRPGKKHYIKIRVGAPKMFTDKWYPQTDLCDMVLLTVYATTADMQYPFGSPLTDSVVVNFQVLQSMYDENISILPTEKSKRDVLHSTIANYTPFYNTTQIIAQLRPFVDAGNLTSASTTTTWGSYINTTKFNTTATTTYTYPGSTTTTVTMLTCNDSWYRGTVYNNQISKLPKQAAEFYSKATKTLLGNTFTTEDHTLEYHGGLYSSIWLSAGRSYFETPGAYTDIKYNPFTDRGEGNMLWIDWLSKNNMNYDKVQSKCLISDLPLWAAAYGYVEFCAKSTGDQNIHMNARLLIRSPFTDPQLLVHTDPTKGFVPYSLNFGNGKMPGGSSNVPIRMRAKWYPTLFHQQEVLEALAQSGPFAYHSDIKKVSLGMKYRFKWIWGGNPVRQQVVRNPCKETHSSGNRVPRSLQIVDPKYNSPELTFHTWDFRRGLFGPKAIQRMQQQPTTTDIFSAGRKRPRRDTEVYHSSQEGEQKESLLFPPVKLLRRVPPWEDSQQEESGSQSSEEETQTVSQQLKQQLQQQRILGVKLRLLFNQVQKIHQNQDINPTLLPRGGDLASLFQIAP

SEQ ID NO: 235 - protein, 770 aa, Torque teno virus
MAYGWWRRRRRRWRRWRRRPWRRRWRTRRRRPARRRGRRRNVRRRRRGGRWRRRYRRWKRKGRRRKKAKIIIRQWQPNYRRRCNIVGYIPVLICGENTVSRNYATHSDDTNYPGPFGGGMTTDKFTLRILYDEYKRFMNYWTASNEDLDLCRYLGVNLYFFRHPDVDFIIKINTMPPFLDTELTAPSIHPGMLALDKRARWIPSLKSRPGKKHYIKIRVEAPKMFTDKWYPQTDLCDMVLLTVYATTADMQYPFGSPLTDSVVVNFQVLQSMYDQNISILPTEKSKRTQLHDNITRYTPFYNTTQTIAQLKPFVDAGNVTPVSPTTTWGSYINTTKFTTTATTTYTYPGTTTTTVTMLTCNDSWYRGTVYNNQISQLPKKAAEFYSKATKTLLGDTFTTEDYTLEYHGGLYSSIWLSAGRSYFETPGVYTDIKYNPFTDRGEGNMLWIDWLSKKNMNYDKVQSKCLISDLPLWAAAYGYVEFCAKSTGDQNIHMNAKLLIRSPFTDPQLLVHTDPTKGFVPYSLNFGNGKMPGGSSNVPIRMRAKWYPTLFHQQEVLEALAQSGPFAYHSDIKKVSLGMKYRFKWIWGGNPVRQQVVRNPCKETHSSGNRVPRSLQIVDPKYNSPELTFHTWDFRRGLFGPKAIQRMQQQPTTTDIFSAGRKRPRRDTEVYHSSQEGEQKESLLFLPVKLLRRVPPWEDSQQEESGSQSSEEETQTVSQQLKQQLQQQRILGVKLRLLFNQVQKIQQNQDINPTLLPRGGDLASLFQIAP

SEQ ID NO: 236 - protein, 765 aa, Torque teno virus
MAYGWWRRRRRRWKRWRRRPRWRRPWRTRRRRPARRRGRRRTVRRRERGRWRRRYRRWRKKGKRRIKKKLIIRQWQPNYTRKCDILGYMPVIMCGENTLIRNYATHANDCYWPGPFGGGMATQKFTLRILYDDYKRFMNYWTSSNEDLDLCRYRGVTLYFFRHPDVDFIILINTTPPFVDTEITGPSIHPGMMALNKRARFIPSLKTRPGRRHIVKIRVGAPKLYEDKWYPQSELCDMPLLTVYATAADMQYPFGSPLTDTPVVTFQVLRSMYNDALSILPSNFEQDDNAGQKLYNEISSYLPYYNTTETIAQLKRYVENTEKISTTPNPWQSNYVNTITFTTAQSITTTTPYTTFSDSWYRGTVYKNAITKVPLAAAKLYETQTKNLLSPTFTGGSEYLEYHGGLYSSIWLSAGRSYFETKGAYTDICYNPYTDRGEGNMLWIDWLSKGDSRYDKARSKCLIEKLPMWAAVYGYAEYCAKATGDSNIDMNARVVMRCPYTVPQMIDTSDPLRGFIPYSFNFGKGKMPGGTNQVPIRMRAKWYPCLFHQKEVLEAIGQSGPFAYHSDQKKAVLGLKYRFHWIWGGNPVFPQVVRNPCKDTQGSTGPRKPRSVQIIDPKYNTPELTIHAWDFRRGFFGPKAIKRMQQQPTDAELLPPGRKRSRRDTEVLQSSQERQKESLLLQQLHLQGRVPPWESLQGLQTETESQKEHEGTLSQQIREQVQQQKLLGRQLREMFLQLHKILQNQHVNPTLLPRDQGLIWWFQIQ

SEQ ID NO: 237 - protein, 765 aa, Torque teno virus
MAYGWWRRRRRRWKRWRRRPRWRRPWRTRRRRPAGRRGRRRTVRRRRRGRWRRRYRRWRKKGRRRRKKKLIIRQWQPNYTRKCNIVGYMPVIMCGENTLIRNYATHAYNCSWPGPFGGGMATQKFTLRILYDDYKRFMNYWTSSNEDLDLCRYRGATLYFFRDPDVDFIILINTTPPFVDTEITGPSIHPGMLALNKRARFIPSLKTRPSRRHIVKIRVGAPKLYEDKWYPQSELCDMPLLTVYATATDMQYPFGSPLTDTPIVTFQVLRSMYNDALSILPSNFEGDDSAGAKLYKQISEYIPYYNTTETIAQLKGYVENTEKTQTTPNPWQSKYVNTKPFDTAQTITNQKPYTPFADTWYRGTAYKEEIKNVPLKAAELYELHTTHLLSTTFTGGSKYLEYHGGLYSSIWLSAGRSYFETKGAYTDICYNPYTDRGEGNMVWIDWLVKTDSRYDKTRSKCLIEKLPLWAAVYGYAEYCAKATGDSNIDMNARVVIRSPYTTPQMIDTNDSLRGFIVYSFNFGKGKMPGGTNQVPIRMRAKWYPCLFHQKEVLEAIGQSGPFAYHSDQKKAVLGLKYRFHWIWGGNPVFPQVVRNPCKDTQGSTGPRKPRSVQIIDPKYNTPELTIHAWDFRRGFFGPKAIKRMQQQPTDAELLPPGRKKSRRDTEVLQSSQERQKESLLFQQLQLQRRVPPWESSQGSQTETESQKEQEGTLSQQLREQLQQQKLLGRQLREMFLQIHKILQNQQVNPILLPRDQALISWFQIQ

SEQ ID NO: 238 - protein, 765 aa, Torque teno virus
MAYGWWRRRRRRWKRWRRRPRWRRRWRTRRRRPAGRRRRRRTVRRRRRGRWRSRYRRWRRKGRRRRKEKLIIRQWQPNYTRKCNIVGYMPVIMCGENTVIRNYATHTYDCSWPGPFGGGMATQKFTLRILYDDYKRFMNYWTSSNEDLDLCRYRGATLYFFRDPDVDFIILINTTPPFVDTEITGPSIHPGMLALNKRARFIPSLKTRPGRRHIVKIKVGAPRMYEDKWYPQSELCDMPLLTIYATATDMQHPFGSPLTDTPVVTFQVLRSMYNDALSILPSNFEDDSSPGAALYKQISEYIPYYNTTETIAQLKRYVENTEKTQTTLNPWQSRYVNTTLFNTAETIANQKPYTKFADTWYRGTAYKDAIKDIPLKAAELYVNQTKYLLSTTFTGGSKYLEYHGGLYSSIWLSAGRSYFETKGAYTDICYNPYTDRGEGNMVWIDWLSKTDSKYDKTRSKCLIEKLPLWASVYGYAEYCAKATGDSNIDMNARVVIRCPYTTPQMIDTTDPTRGFIVYSFNFGKGKMPGGSNEVPIRMRAKWYPCLFHQKEVLEAIGQSGPFAYHSDQKKAVLGLKYKFHWIWGGNPVFPQVIKNPCKNTQFSTGPRKPRSLQIIDPNYNTPKLTIHAWDFRLGFFGPKAIKRMQQQPTDAELLPPGRKRSRRDTEVLQSSQERQKGNLLFQQFQLQRRVPPWESSQGSQTGTQSQKEQEGTLSQQLREQLQQQKLLGRQLREMFLQLHKIQQNQHVNPTLLPRDQALICWFQIQ

SEQ ID NO: 239 - protein, 770 aa, Torque teno virus; identical to SEQ ID NO: 233

SEQ ID NO: 240 - protein, 733 aa, Torque teno virus
TAWWWGRWRRRWRPRYRRRTWRVRRRRPRRTFRRRRRGRYVSRRRRRRYYRRRLRRGRRRGRRKRHRQTLVLRQWQPDIVRHCKITGWMPLIICGSGSTQNNFITHMDDFPPMGYSFGGNFTNLSFSLEGIYEQFLYHRNRWSRSNHDLDLARYKGTTLKLYRHHTLDYIVSYNRTGPFQISDMTYLSTHPALMLLQKHRIVVPSLLTKPKGKRSIKVRIKPPKLMLNKWYFTKDICSMGLFQLQATACTLYNPWLRDTTKSPVIGFRVLKNSIYTNLSNLPEHDQTRQAIRRKLHPDSLTGSTPYQKGWEYSYTKLMAPIYYQANRNSTYNWLNYQTNYAQTFTKFKEKMNENLALIQKEYSYHYPNNVTTDLIGKNTLTHDWGIYSPYWLTPTRISLDWETPWTYVRYNPLADKGIGNAVYAQWCSEQTSKLDTKKSKCIMKDLPLWCIFYGYVDWIIKSTGVSSAVTDMRVAIISPYTEPALIGSSPDVGYIPVSDTFCNGDMPFLAPYIPVGWWIKWYPMIAHQKEVFEAIVNCGPFVPRDQTTPSWEITMGYKMDWLWGGSPLPSQAIDDPCQKPTHELPDPDRHPRMLQVSDPTKLGPKTVFHKWDWRRGMLSKRSIKRVQEDSTDDEYVAGPLPRKRNKFDTRAQGLQTPEKESYTLLQALQESGQETSSEDQEQAPQEKEGQKEALMEQLQLQKQHQRVLKRGLKLLLGDVLRLRRGVHWDPLLS

SEQ ID NO: 241 - protein, 733 aa, Torque teno virus
TAWWWGRWRRRWRPRYRKRTWRLRRRRPRRTFRRRRRRQYVSRRRRRRYYRRRLRRGRRRGRRKRHRQTLVLRQWQPDVVRHCKITGWMPLIICGSGSTQNNFITHMDDFPPMGYSFGGNFTNLTFSLEGIYEQFLYHRNRWSRSNHDLDLARYKGTTLKLYRHHTLDYIVSYNRTGPFQISDMTYPSTHPALMLLQKHRIVVPSVLTKPKGKRSIKVRIKPPKLMLNKWYFTKDICSMGLFQLQATACTLYNPWLRDTTKSPVIGFRVLKNSIYTNLSNLPDHEGSREAIRKKLHPQSLTGHSPNQKGWEYSYTKLMAPIYYSANRNSTYNWLNYQDNYVATYTKFKVKMTDNLQLIQKEYSYHYPNNTTTDLIKNNTLTHDWGIYSPYWLTPTRISLDWETPWTYVRYNPLADKGIGNAVYAQWCSEQTSKLDPKKSKCIMRDLPLWCIFYGYVDWIVKSTGVSSAVTDMRVAIRSPYTEPALIGSTEDVGFIPVSDTFCNGDMPFLAPYIPVGWWIKWYPMIAHQKEVFEQIVNCGPFVPRDQTTPSWEITMGYKMDWLWGGSPLPSQAIDDPCQKPTHELPDPDRHPRMLQVSDPTKLGPKTVFHRWDWRRGMLSKRSIKRVQEDSTDDEYVAGPLPRKRNKFDTRAQGLQSPEKESYTLLQALQESGQESSSEDQEQAPQEKEGQKEALMEQLQLQKQHQRVLKRGLKLLLGDVLRLRRGVHWDPLLS

SEQ ID NO: 242 - protein, 733 aa, Torque teno virus
TAWWWGRWRRRWRPRYRRRTWRVRRRRPRRTFRRRRRGRYVSRRRRRRYYRRRLRRGRRRGRRKRHRQTLVLRQWQPDVLRRCKITGWMPLIICGSGSTQNNFITHMDDFPPMGYSYGGNFTNLTFSLEGIYEQFLYHRNRWSRSNHDLDLARYKGTTLKLYRHHTLDYIVSYNRTGPFQISDMTYLSTHPALMLLQKHRIVVPSLLTKPKGKRSIKVRIKPPKLMLNKWYFTKDICSMGLFQLQATACTLYNPWLRDTTKSPVIGFRVLKNSIYTNLSNLPDHEGAREAIRKKLHPQSLTGSVPNQKGWEYSYTKLMAPIYYQAIRNSTYNWLNYQQNYSQTYQTFKQKMQDNLQLIQKEYMYHYPNNVTTDILGKNTLTHDWGIYSPYWLTPTRISLDWETPWTYVRYNPLADKGIGNAVYAQWCSEQTSNLDTKKSKCIMKDLPLWCIFYGYVDWVVKSTGVSSAVTDMRVAIISPYTEPALIGSSPEVGYIPVSDTFCNGDTPFLAPYIPVGWWIKWYPMIAHQKEVFEAIVNCGPFVPRDQTTPSWEITMGYKMDWLWGGSPLPSQAIDDPCQKPTHELPDPDRHPRMLQVSDPTKLGPKTVFHKWDWRRGMLSKRSIKRVQEDSTDDEYVAGPLPRKRNKFDTRAQGLQSPEKESYTLLQALQESGQETSSEDQEQAPQEKEGQKEALMEQLQLQKQHQRVLKRGLKLLLGDVLRLRRGVHWDPLLS

SEQ ID NO: 243 - protein, 785 aa, Torque teno virus
MAQGRRRYRRGWQRRVYLRRRRRRRRKRLVLTQWHPAVRRKCTITGYMPVVWCGHGRASYNYAWHSDDCIKQPWPFGGSLSTVSFNLKVLYDENQRGLNRWTYPNDQLDLGRYKGCKLTFYRTKNTNYPGPFGGGMTTDKFTLRILYDEYKRFMNYWTASNEDLDLCRYLGVNLYIFRHPDVDFIIKINTMPPFLDTEITAASIHPGILALDKRARWIPSLKSRPGKKHYIKIRVGAPKMFTDKWYPQTDLCDMVLLTIYATAADMQYPFGSPLTDTVVVNFQVLQSMYDENISILPDQKTQREKLLTSISNYIPFYNTTQTIAQLKPFVDAGNKVSGTTTTTWASYINTTRFTTTATTTYTYPGSTTNTVTMLTSNDSWYRGTVYNNQIKNLPKQAAELYSKATKTLLGNTFTTEDYTLEYHGGLYSSIWLSPGRSYFETPGAYTDIKYNPFTDRGEGNMLWIDWLSKKNMNYDKVQSKCLVSDLPLWAAAYGYVEFCAKSTGDQNIHMNARLLIRSPFTDPQLLVHTDPTKAFVPYSLNFGNGKMPGGSSNVPIRMRAKWYPTLFHQQEVLEALAQSGPFAYHSDIKKVSLGIKYRFKWIWGGNPVRQQVVRNPCKEPHSSGNRVPRSIQIVDQKYNSPELTIHSWDFRRGFFGPKAIQRMQQQPTATEFFSAGRKRPRRDTEVYQSDQEKEQKESSLFPPVKLLRRVPPWEDSDRKQSGSQSSEEETQTVSQQLKQQLQQQRILGVKLRLLFYQIQRIQQNQDINPTLLPRGGDLASLFQIA

SEQ ID NO: 244 - protein, 748 aa, Torque teno virus
MAWTWWWQRRRRRWPWRRRRWRRLRTRRPRRLVRRRRKRYRVRRRRRWGRRRGRRTYLRRGLKKRKRRKKLRLTQWNPSTIRGCTIKGMAPLIVCGHTMAGNNFAIRMEDYVSQIKPFGGSFSTTTWSLKVLWDEHTRFHNTWSYPNTQLDLARFKGVTFYFYRDKDTDFIITYSSVPPFKIDKYSSAMLHPGMLMQRKKKILLPSFTTRPRGRKKVKVHIKPPVLFEDKWYTQQDLCDVNLLSLAVSAASFRHPFCPPQTDNICITFQVLKDKYYTQMSVTPDTAGTKKDDEILDHLYSTAEYYQTVHTQGIINKTQRVAKFSTSNNTLGDQSEISLYLNQPTTTNIGNTLSTGHNSVYGFPSYNPQKDKLRKIADWFWTQEANKENVVTGSYSMPTNKAVGYHLGKYSPIFLSSYRTNLQFRTAYTDVTYNPLNDKGKGNEIWVQYVTKPDTVFNPTQCKCHVIDLPLWSAFHGYIDFVQSELGIQEEILNIAIIVVICPYTKPKLVHETNPKQGFVFYDTQFGDGKMPEGSGLVPIYYQNRWYPRIKFQSQVVHDFILTGPFSYKDDLKSTVLTVEYKFKFLWGGNMIPEQVIRNPCKTEGHDLPHTSRLHRDLQVVDPHTVGPQWALHTWDWRRGLFGSEAIKRVSEQQVHDELYYPPSKKPRFLPPISGLQEQERDYSSQEEKEQSSSEEETDPKKKEQKQQQRLHLQFQEQQRLGNQLRLIFRELQKTQAGLHLNPMLSNRL

SEQ ID NO: 245 - protein, 726 aa, Torque teno virus
MAWGWWKRRRRWWFRKRWTRGRLRRRWPRPARRRPRRRRVRRRRRWRRGRPRRRLYRRYRRKKRRRRKPKIILKQWQPDIVKRCYIVGYIPAIICGAGTWSHNYTSHLLDIIPKGPFGGGHSTMRFSLKVLFEEHLRHLNFWTRSNQDLELVRYFRCSFRFYRDQHTDYLVHYNRKTPLGGNRLTAPSLHPGVQMLSKNKIIVPSYDTKPKGKSYVKVTIAPPTLLTDKWYFAKDVCDTTLVNLDVVLCNLRFPFCSPQTDNPCITFQVLHSIYNDFLSIVDTQEYKNNFVTTLSTKLGTTWGSRLNTFRTEGCYSHPKLPKKQVTAANDSTYFTQPDGLWGDAVFETKDTTIITKNMESYATSAKQRGVNGDPAFCHLTGIYSPPWLTPGRISPETPGLYTDVTYNPYADKGVGNRIWVDYCSKKGNKYDNTSKCLLEDMPLWMVTFGYVDWVKKETGNWGIPLWARVLIRSPYTVPKLYNEADPSYGWVPISYYFGEGKMPNGDMYVPFKVRMKWYPSMWNQEPVLNDLAKSGPFAYKDTKTSVTVTTKYKFTFNFGGNPVPSQIVQDPCTQPTYDIPGTGNLPRRIQVIDPKVLGPHYSFHRWDFRRGLFGQQAIKRVSEQQTTSEFLFSGPKRPRIDQGPYIPPEKGSDSLQRESRPWSTSESEAETEAPSEEEPENQEEQVLQLQLRQQLREQRKLRQGIQCLFEQLITTQQGVHKNPLLE

SEQ ID NO: 246 - protein, 763 aa, Torque teno virus
MAYGWWARRRRRWRRWKRRPWRRRWRTRRRRPRRRYRRRRHVRRRRRGRWRRRYRKWRRKGRRRGKKKIIIRQWQPNYRRRCNIIGYMPVLICGNNTVSRNYATHSDDSYLPGPFGGGMTTDKFTLRILYDEYCRFMNYWTASNEDLDLCRYRGCTLWFFRHPDVDFIILINTMSPFLDTQLTGPSIHPGLMALNKRARWIPSLKSRPGRKHVVKIRVGAPRMFTDKWYPQSDLCDLPLLTIFASAADMQYPFGSPLTDSVVVGFQVLQSMYNDCLSILPENFNGNGKGKALHDNITKYLPNYNTTQTLAQLKPYIDNTSTGSTNNWSSYVNTSKFTTASKTITTSAEGPYYTFADTWYRGTAYNNSITNVPLQAAQLYHDTTKKLLGTTFTGGSPYLEYHGGLYSSIWLSAGRSYFETKGTYTDITYNPFTDRGQGNMVWIDWVSKYDSVYSKTQSKCLIENLPLWASVYGYAEYCSKSTGDTNIEQNCRVVIRSPFTNPQLLDHNNPLRGYVPYSINFGNGKMPGGSSQVPIRMRSKWYPTLFHQKEVLEAIAQAGPFAYHSDQMKVSLGMKYAFKWVWGGNPVSQQVVRNPCKDTGVSSGNRVPRSVQIVDPKYNTPELAIHAWDFRRACLAQKLLRECKQNRTLLNFFRQGEKDTGETQKLYSPAKKNNKKKTYFSSQSSSSDQSPVGGVGPKPKRGRGGPTRDADTLPAAPAAAQGAAAHGGPTPSPVPTITTGPTKHTYRPYLFARGAGVTSLFQTA

SEQ ID NO: 247 - protein, 760 aa, Torque teno virus
MAWWGRWRRWPRRRWRRWRRRRRRRLPTRRTRRAVRGLGRRPRKTVRRRRRRPRRTYRRGWRRRRYIRRRRGRRKKLTLTMWNPNIVRRCNIEGGLPLILCGENRAAFNYAYHSEDYTEQPFPFGGGMSTTTFSLRGLYDQYTKHMNRWTFSNDQLDLARYRGCKFRFYRHPTCDFIVHYNLVPPLKMNQFTSPNTHPGLLMLTKHKIIIPSFLTRPGGRRFVKIRLPPPKLFEDKWYTQQDLCKQPLVTLTATAASLRYPFCSPQTNNPNCTFQVLRKNYHKVIGTSSTNSEDVTPFENWLYNTASHYQTFATEAQVGRIPSFNPDGTKNTKESEWQNYWSKKGEPWNPNSSYPHTTTNQMYKIPFDSNYGFPTYKPIKEYMLQRRAWSFKYETDNPVSKKIWPQPTTTKPTIDYYEYHAGWFSNIFIGPNRHSLQFQTAYVDTTYNPLNDKGKGNKIWFQYHSKVNTDLRDRGIYCLLEDMPLWSMTFGYSDYVSTQLGPNVDHETQGLVCIICPYTEPPMYDKTNPNSGYVAYDTNFGNGKMPSGRSQVPVYWQCRWRPMLWFQQQVLNDISKSGPYAYRDELKNCCLTAYYNFIFDWGGDMYYPQVIKNPCADSGLVPGTSRFTREVQVVSPLSMGPQYILHLFDQRRGFFSSNALKRMQQQQEFDESFTVKPKRPKLSTAAHVEQQEEDSSSRERKSGSSQEEVQEEVLQTPEIQLHLQRNIREQLHIKQQLQLLLLQLFKTQANIHLNPRFISP

SEQ ID NO: 248 - protein, 772 aa, Torque teno virus
MAWRRWRWRPWWRRRRRRRWRRRRRRPRRRRPYRRRRPRRVRRRRGRWRRAYRRWGRRRRRRRHKKKLVLTQWQPAVVKRCLIVGFDPLIICGINRTIFNYTTHSEDFTFNNDSFGGGLCTAQYTLRILFQEKLAQHNFWSASNEDLDLARYLGATIVLYRHPTVDFLVRIRTSPPFEDTDMTAMTLHPGMMMLAKKTIKIPSLKTRPSRKHVVRIRVGAPKLFEDKWYPQNELCDVTLLTIQATTADFQYPFGSPLTNSPCCNFQVLNSNYDNAHSILNLSNEPTNKWHTYRNNCYKFLLEQYSYYNTKQVVAQLKYKWNPNQNPTMPNTSNASLSKKPDDLTKTKTTNEYPHWDTLYGGLAYGHSTVTPGTTSSPTDLKTQMLTGNEFYTTAGKKLIDTFHPIPYYENGSSKANTNIFDYYTGMYSSIFLSSGRSNPEVKGSYTDISYNPLTDKGVGNMIWIDWLTKGDTVYDPKKSKCLLSDFPLWSLCYGYPDYCRKQTGDSGIYYDYRVLIRCPYTYPQLIKHNDKYFGFVVYSENFGLGRLPGGNPNPPTRMRLHWYPNMFHQTEVLECIAQSGPFAYHGDERKAVLTAKYKFRWKWGGNPVFQQVLRDPCTGGAVAPHTSRHPRAIQVHDPKYQAPEYLFHKWDFRRGLFSTKGIKRVSEQPVHDEYFTGSSKRPKKDTNPSPQGEEQKEGSRFRVPELRPWLPSSQETQSQSEQEETAPKTVQEQLQEQLQQQQLMGIQLRNVCLQLARVQAGHSLHPVFQCHA

SEQ ID NO: 249 - protein, 426 aa, Torque teno virus
MAWGWWRRRRKWWWRRRFARSRLRRRRIRRPRRRTRRRTVRRRRQWRRGRPRRRLFKRKRRFKRRRRKAKIKITQWQPSSVKRCFVIGYFPLVICGPGRWSENFTSHIEDKISKGPFGGGHSTSRWSLKVLYEEFQRHHNFWTRSNKDLELVRFFGSSWRFYRHEDTDYIVYYSRKAPLGGNLLTAPSLHPGAAMLSKHKIVVPSFKTRPGGKPTVKINIKPPTTLIDKWYFQKDICDTTFLNLNVVLCNLRFPFCSPQTDNICVTFQILHEVYHNYISITAKELLTGTEWRQYYKNFLNAALPNDRSVNKLNTFSTEGAYSHPQIKKHTENITGSGDKYFRKKDGLWGDAIHITDQQNRTEVIDLILKNAENYLKKVQQEYQGQENLKNLIHPVFCQYVGIFGQPTTKLPQNKPRNSRPVQRHNI

SEQ ID NO: 250 - protein, 739 aa, Torque teno virus
MSWWGWRRRWWWKPRRRWRRRRARRPRRLPRRRYRRPTRRYRGRRVRRRRAGGWRGRRRYSRRYSRRLTVRRKKKKLTLKIWQPQNIRRCKIRGLLPLLICGHTRSAFNYAIHSDDKTPQQQSFGGGLSTVSFSLKVLFDPNQRGLNRWSASNDQLDLARYTGCTFWFYRHKKTDFIVQYDVSAPFKLDKNSCPSYHPFMLMKAKHKVLIPSFDTKPKGREKIKLRIQPPKMFIDKWYTQEDLCPVILVTLVATAASFTHPFCSPQTANPCITFQVLKEFYYQAMGYGTPETTMSTIWNTLYTTSTYWQSHLTPQFVRMPKNNPDNTANTEANKFNEWVDKTFKTGKLVKYNYNQYKPDIEKLTLLRQYYFRWETQHTGVAVPPTWTTPTTDRYEYHVGMFSPIFLTPYRSAGLDFPYAYADVTYNPLTDKGVGNRMWYQYNTKIDTQFDAKCCKCVLEDMPLYAMAFGHADFLEQEIGEYQDLEANGYVCVISPYTKPPMFNKHNPQQGYVFYDSQWGNGKWIDGTGFVPVYWLTRWRVELLFQKQVLSDLAMSGPFSYPDELKNTVLTAKYRFDFKWGGNLFHQQTIRNPCKPEETSTGRIPRDVQVVDPVTMGPRFVFHSWDWRRGFLSDRALKRMFEKPLDFEGFTATPKRPRILPPTEGQLAREQKEQEESSDSQEESSLTPLEEVPQETKLRLHLRKQLREQRSIRHQLRTMFQQLVKTQAGLHLNPLLSSQL

SEQ ID NO: 251 - protein, 666 aa, Torque teno virus
MWNPSTIRACNIKGAINLVMCGHTQAGRNYAIRSEDFYPQIQSFGGSFSTTTWSLRVLFDEYQKFHNFWTYPNTQLDLCRYKYAIFTFYRDPKVDYIVIYNTNPPFKINKYSSPFLHPGLMMLQKKKILIPSFQTKPGGKSRIKVKIKPPALFEDKWYTQQDLCPVNLLSLAVSACSFIHPFCSPESDTICMTFQVLREFYYTHLTVTPTTTTSTPEKDKKIFNDQLYSNANFYQSLHASAFLNIAQAPAIHGHNGIPNNSRYLSSTGTETSFRTGNNSIYGQPNYKPIPEKLTEIRKWFFKQATTPNEIHGTYGKPTYDAVDYHLGKYSPIFLSPYRTNTQFPTAYMDVTYNPNVDKGKGNKIWLQSVTKETSDFDSRSCRCIIENLPMWAMVNGYSDFAESELGSEVHAVYVCCIICPYTKPMLYNKTNPAMGYIFYDTLFGDGKLPSGPGLVPFYWQSRWYPKLAWQQQVLHDFYLCGPFSYKDDLKSFTINTTYKFKFLWGGNMIPEQVIKNPCKTTDPTYTLSDRQRRDLQVVDPITMGPQWEFHTWDWRRGLFGQNALRRVSEKPGDDAEYYAPPKKPRFFPPTDLEEQEKDSDSQEETRLLFHPSPPRSQEEIQQEQQRDIHLRLGQQLRIRQQLQQVFLQVLKTQANLHINPLFLNQQ

SEQ ID NO: 252 - protein, 745 aa, Torque teno virus
MAWGWWRRWRRWPTRRWRRRRRRRPVRRTRARRPARRYRRRRTVRTRRRRWGRRRYRRGWRRRTYVRKGRHRKKKKRLVLRQWQPATRRRCTITGYLPIVFCGHTKGNKNYALHSDDYTPQGQPFGGALSTTSFSLKVLYDQHQRGLNKWSFPNDQLDLARYRGCKFYFYRTKQTDWVGQYDISEPYKLDKYSCPNYHPGNMIKAKHKFLIPSYDTNPRGRQKIIVKIPPPDLFVDKWYTQEDLCDVNLVSFAVSAASFLHPFGSPQTDNPCYTFQVLKEFYYQAIGFSATEEKIQNVFNILYENNSYWESNITPFYVINVKKGSNTAQYMSPQISDADFRNKVNTNYNWYTYNAKTHKEKLKTLRQAYFKQLTSEGPQHTSSHAGYATQWTTPSTDAYEYHLGMFSTIFLAPDRPVPRFPCAYQDVTYNALMDKGVGNHVWFQYNTKADTQLILTGGSCKAHIENIPLWAAFYGYSDFIESELGPFVDAETVGLICVICPYTKPPMYNKTNPMMGYVFYDRNFGDGKWTDGRGKIEPYWQVRWRPEMLFQETVMADIVQTGPFSYKDELKNSTLVCKYKFYFTWGGNVMFQQTIKNPCKTDEQPTDSGRHPRGIQVADPEQMGPRWVFHSFDWRRGYLSEKALKRLQEKPLDYDEYFTQPKRPRMFPPTESAEGEFREPEKGSYSEEERSQASAEEQTKEATVLLLKRRLREQQQLQQQLQFLTREMFKTQAGLHLNPMLLNQR

SEQ ID NO: 253 - protein, 151 aa, Torque teno virus
MRFSRIYRPKKGPLPLPLVRAEQKKQPSDMSWRPPLHNGAGIERQFFEGCFRFHASCCGCGNFVTHITLLAARYGFTGGPTPPGGPGALPSLRRALPPPPAPQDQAEPELWRGRGGGGEGNAGGRAEGGDGEGYEPEELEELFRAAAADDE

SEQ ID NO: 254 - protein, 742 aa, Torque teno virus
MAFRWWWWRRRPQRRWTRRRWRRLRTRRPRRTVRRRRRRPRVRRRRWGRRRGRRRLYRRTYRKRRKRRKKMTLKMWNPSTIRACNIRGFIALVVCGHTRAGCNYAIHSEDYIPQLRPYGGSFSTTTWSLKLLFDEYLKFRNKWSYPNTELNLARYRGATFTFYRDPKVDYIVVYNTVPPFKLNKYSCPMLHPGMMMQYKKKVLIPSYQTKPKGKAKIRLRIKPPVLFEDKWYTQQDLCPVNLLSLAVSACSFLHPFIPPESDNICITFQVLRDFYYTQMSVTPTTTTSLNQKDEKIFSDHLYKNPEYWQSHHTAARLSTSQKPALRNKEEIPNDHGYLNTTPTDSTFRTGNNTIYGQPSYRPNYTKLTKIREWYFTQENTDNPIHGSYLKPTLNSVDYHLGKYSAIFLSPYRTNTQFDTAYQDVTYNPNTDKGKGNKIWIQSCTKESTILDNACRCVIEDMPLWAMVNGYLEFCDSELPGANIYNTYIVVVICPYTKPQLLNKTNPKQGYVFYDTLFGDGKMPTGTGLVPFWLQSRWYPRAEFQQQVLHDLYLTGPFSYKDDLKSFSFNAKYKFSFLWGGNMIPQQIIKNPCKKEESTFTYPSREPRDLQVVDPLTMGPEWVFHTWDWRRGLFGKNAVDRVSKKPDDDAEYYPVPKRPRFFPPTDTQSEPEKDFGFTPESQELQQEDLRAPQEESQEVQQQRLLQLRLSQQFRLRQQLQHLFVQVLKTQAGLHINPLFLNHA

SEQ ID NO: 255 - protein, 750 aa, Torque teno virus
MAWTWWWQRRRRRWPWRRRRWRRLRTRRPRRLVRRRRKRYRVRRRRRWGRRRGRRTYLRRRLKKRKRRKKLRLTQWNPSTIRGCTIKGMAPLIICGHTMAGNNFAIRMEDYVSQIRPFGGSFSTTTWSLKVLWDEHTRFHNTWSYPNTQLDLARFKGVNFYFYRDKDTDFIVTYSSVPPFKMDKYSSAMLHPGTLMQRKKKILIPSFTTRPRGRKKVKLHIKPPVLFEDKWYTQQDLCDVNLLSLAVSAASFRHPFCPPQTDNICITFQVLKDFYYTQMSVTPDTAGQEKDIEIFEKHLFKNPQFYQTVHTQGIISKTRRTAKFSTSNNTLGSDTNITPYLEQPTATNHKNTLSTGNNSIYGLPSYNPIPDKLKKIQEWFWKQETDKENLVTGSYQTPTNKSVSYHLGKYSPIFLSSYRTNLQFITAYTDVTYNPLNDKGKGNQIWVQYVTKPDTIFNERQCKCHIVDIPLWAAFHGYIDFIQSELGIQEEILNIAIIVVICPYTKPKLVHDPPNQNQGFVFYDTQFGDGKMPEGSGLVPIYYQNRWYPRIKFQSQVVHDFILTGPFSYKDDLKSTVLTVEYKFKFLWGGNMIPEQVIRNPCKTEGHDLPHTSRLHRDLQVVDPHTVGPQWALHTWDWRRGLFGSEAIKRVSEQQVHDELYYPASKKPRFLPPISGLQEQERDYSSQEEKDQSSSEEEKDPKKKEQKQQQRLHLQFQEQQRLGNQLRLIFRELQKTQAGLHINPMLSNRL

SEQ ID NO: 256 - protein, 755 aa, Torque teno virus
MAWRWWWRRRWKPRRRPAWTKYRRRRWRRLRPRRPRRLARGRRRRRTVRRRRVRRLRRRRGWTRRRYLRRRKRRKLILTQWNPNIVRRCSIKGIIPLTMCGANTASFNYGMHSDDSTPQPEKFGGGMSTVTFSLYVLYDQFTRHMNRWSYSNDQLDLARYRGCSFKLYRNPTTDFIVQYDNNPPMKNTILSSPNTHPGMLMQQKHRILVPSWQTFPRGRKYVKVKIPPPKLFEDHWYTQPDLCKVPLVTLRSTAADFRHPFCSPQTNNPCTTFQVLRENYNEVLGLPYANTGSNNEVKIKIDNFENWLYNSSVHYQTFQTEQMFRPKQYNADGSTWKDYKSMLSTWTSQIYNKKTDSNYGYASYDFSKGKEFATQMRQHYWVQLTQLTATVPHIGPTYSNTTTPEYEYHAGWYSPVFIGPNRHNIQFRTAYMDVTYNPLNDKGQFNRVWFQYSTKPTTDFNNTQCKCVLENIPLWSALFGYSEYVESQLGPFQDHGTVGVVVVQCPYTVPPMYNKEKPDMGYVFYDTHFGNGKLGNGSGQVPRYWQMRWYPILKRQKQVMNDICKTGPFSYRDELLQVDLASPYTFRFNWGGDLLYHQVIKDPCSSSGLAPTDSSRFKRDVQVVSPLTMGPRLLFHSFDQRRGFFTPGAIKRMHDEQINVPDFTQKPKIPRIFPPVELRERAEAEEDSGSEKASFTSSQEREAEAQEKLPIQLQLRQQLRQQQQLRVHLQQVFLQLQKTKAHLHINPLFLAQGNM

SEQ ID NO: 257 - protein, 759 aa, Torque teno virus
MAYSYWWRRRRWPWRGRWRRWRRRRRIPRRRPRRPVRRYRRRPVRRKRRWGRRGRRRRYTRRYRRRLTVRRKRNKLRLSVWQPQNIRYCAIKGLFPILICGHGKSAGNYAIHSDDFITSRFSFGGGLSTTSYSLKLLFDQNLRGLNRWTASNDQLDLARYLGAIFWFYRDQKTDYIVQYDISEPFKIDKDSSPSFHPGILMKSKHKVLVPSFQTWPKGRSKVKLKIKPPKMFVDKWYTQEDLCTVTLVSLVVSLASFQHPFCRPLTDNPCVTFQVLQNFYNNVIGYSSSDTLVDNVFTSLLYSKASFWQSHLTPSYVKKINNNPDGSSISQRVGTMPDMTEYNKWVSNTNIGTGFVNSNVSVHYNYCQYNPNHTHLTTLRQYYFFWETHPAAANKTPVTHVPITTTKPTKDWWEYRLGLFSPIFLSPLRSSNIEWPFAYRDIIYNPLMDKGVGNMMWYQYNTKPDTQFSPTSCRAVLEDKPIWSMAYGYADFLLSILGEHDDVDFHGLVCIICPYTRPPLFDKDNPKMGYVFYDAKFGNGKWIDGTGFIPVEFQSRWKPELAFRKDVLTDLAMSGPFSYSDDLKNTTIQAKYKFKFKWGGNLSYHQTIRNPCTSDGQTPTTSRQSREVQIVDPLTMGPRYVFHSWDWRRGWLNDRTLKRLFQKPLDFEEYPKSPKRPRIFPPTEQLQEDPQEQERDSSSSEESLPTSSEETPPAHLLRVHLRKQLRQQRDLRVQLRALFAQVLKTQAGLHINPLLLAPQ

SEQ ID NO: 258 - protein, 739 aa, Torque teno virus
TAWWWGRRWRRRPWGRWRRRRRVWRRRPRTAVRRRRGRRYVSRRRRYRRRLRRRGRRRYRGRRKKRQTLVLKQWQPDVNRLCRITGWLPLIVCGTGRAQDNFIVHSEDITPRGAAYGGNLTHITWCLEAIYQEFLMHRNRWSRSNHDLDLCRYQGVVFKAYRHPKVDYILAYTRTPPFQATELSYMSCHPLLMLTAKHRIVVKSQETKKGGKKYVKFRIKPPRLMLNKWYFTHDFCKVPLFSMWASACDLRNPWLREGALSPTVGFFALKPDFYPNLSILPNEVSQQFDFFLNSAHPPSIQSEKDVRWEYTYTNLMRPIYNQTPSLKASTYDWQNYSNPNNYQACHQQFIAFKAQRFAKIKAEYQTVYPTLTTQTPQSEALTQEFGLYSPYYLTPTRISLDWHTVFHHIRYNPMADKGLGNMIWVDWCSRKEATYDPTRSKCMLKDLPLYMRFYGYCDWVTKSIGSETAWRDMRLMVVCPYTEPQLMKKNDKTWGYVIYGYNFANGNMPWLQPYIPISWFCRWFPCITHQREAMESVVATGPFMVRDQDRNSWDITIGYKFLWRWGGSPLPTQAIDDPCQQGTHPLPEPGTLPRILQVSDPTQLGPKTIFHLWDQRRGLFSKRSIERMSEYKGTDDLFSPGRPKRPKLDTRPEGLPEEQRGAYNLLQALEDSAQSEESDQEEMPPLEEEQVLHEQKKEALLQQLQQQKHHQRVLKRGLRLLLGDVLKLRRGLHIDPVLT

SEQ ID NO: 259 - protein, 680 aa, Torque teno virus; identical to SEQ ID NO: 6

SEQ ID NO: 260 - protein, 746 aa, Torque teno virus
TAWWRYRRRPWRRWRRRRWGLRTRRPRRTFRRRRARRYVSRGRRRRYRRRRRRGRRRRGRRRRHRKTLIVRQWQPDVIKRCFITGWLPLIICGNGHTQFNFITHMDDIPPKNASYGGNFTNLTFNLACFYDEFMHHRNRWSASNHDLELVRYIRTSLKLYRHESVDYIVCYTTTGPFETNEMSYMLTHPLAMLLSKRHVVVPSLKTKPHGRKYKKITIKPPKLMLNKWYFATDLCHIGLFQLWATGLELRNPWLRSGTNSPVIGFYVLKNQVYKNRYSNLNTTEAHNARQDAWNELTQTKTNDKWYNWQYTYNKLMKPIYYAASNESSNSAMKGKTYNWKHYKEYFSNTQTKWKTIIKDAYDLVREEYQQLYTTTMAYPPPWQSTTSNTGRQYLEHDCGIYSPYFLTPQIYSPEWHTAWSYIRYNPLTDKGIGNRVCVQYCSEASSDYNPIKSKCMLQDMPLWMMLYGYADYVVKSTGIQSAWTDMRVAIRCPYTDPKLVGSTENTMFIPIGLEFMNGDIPDKRPYIPLTWWFKWYPMITHQKTAIEAIVSCSPFMPRDQEQASWDITVGYKATFLWGGSPLPPQPIDDPCQKGKHDIPDPDTNPPRIQISDPQHLGPATLFHSWDLRRGYINTKSIKRISEHLDANEYFSTGVVSKKPRFDTPHHGQLSNQEEDALSILRQPQKEQEETTSEEEQALQKEEEQKEKLLQQLRVQRQHQRVLRQGIKHLMGDVLRLRQGVHWNPVL

SEQ ID NO: 261 - protein, 738 aa, Torque teno virus
TAWGWYRRRRWRPWRRRRWAIRRRRPRRTVRRRGRRRYVSRWPRRRYRRRRRRTRRRGGRKRRHRQTLILRQWQPDVMKKCFITGWMPLIICGTGNTQFNFITHEDDVPPKGASYGGNLTNLTFTLEGLYDEHLLHRNRWSRSNFDLDLSRYLYTIIKLYRHESVDYIVTYNRTGPFEISPLSYMNTHPMLMLLNKHHVVVPSPKTKPKGKRAIKIKIKPPKLMLNKWYFARDTCRIGLFQLYATGANLTNPWLRSGTNSPVVGFYVIKNSIYQDAFDNLADTEHTNQRKNVFENKLYPTTTTNKDNWQYTYTSLMKNIYFKTKQEAENQTMSSTYNFDTYKTNYDKVRTKWIKIAEDGYKLVSKEYKEIYISTATYPPQWNSRNYLSHDYGIYSPYFLTPQRYSPQWHTAWTYVRYNPLTDKGIGNRIFVQWCSEKNSSYNSTKSKCMLQDMPLFMLTYGYLDYVLKCAGSKSAWTDMRVCIRSPYTEPQLTGNTDDISFVIISEAFMNGDMPYLAPHIPVSLWFKWYPMILHQKAALETIVSCGPFMPRDQEANSWDITAGYKAVFKWGGSPLPPQPIDDPYQKPTHEIPDPDKHPPRLQIADPKILGPSTVFHTWDIRRGLFSTASLKRVSEYQPPDDLFSTGVASKRPRFDTPVQGQLESQEEESYRLLRALQKEQETSSSEEEQPQNQEIQEKLLLQLQQQRQQQRLLAKGIKHLLGDVLRLRKGVHWDPVLT

SEQ ID NO: 262 - protein, 738 aa, Torque teno virus
TAWYRRRRWRPWRRRRRPWTLRRRRARRFVRRRPRRRYVSRWRRRRYRRRLRRGRRRRGRRRRKETIIVRQWQPDVMRNCYITGFLPLIVCGSGNTQFNFITHENDIPPRGASYGGNLTNITFTLAALYDQYLLHRNRWSRSNFDLDLARYINTKLKLYRHDSVDYIVTYNRTGPFEVNPLTYMHTHPLLMLVNRHHIVVPSLKTKPRGKRYIKVKIKPPKLMLNKWYFAKDICPLGLFQLYATGLELRNPWIREGTNSPIVGFYVLKPSLYNGAMSNLADTEHLNQRQTLFNKLLPTQNQKDEWQYTYNKPMQKIYYEAANKQDSGFKNTTYNWTNYKTNYQKVQSQWQTVAQQNYNQVYNEFKEVYPLTATWPPQWNARQYMSHDFGIYSPYFLSPARFTDYWHSAYTYVRYNPMSDKGIGNIICIQWCSEKNSEFNETKNKCILRDMPLYMLTYGYLDYTTKCTGSNSIWTDARVAIRCPYTDPPLSNPTNKNTLYIPLSTSFMQGDMPWPTTNIPLKMWFKWYPMIMHQRACLETIVSCGPFMPRDQTASSWDITIAYRAFFKWGGNPLPPQPIDDPCQKDTHEIPDPDKHPRGIQISDPKVLGPPTVFHTWDIRRGLFSSTSLKRVSEYQPPDDPFSTGVVFKRPRLETQYKGTQETPEEDAYTLLKALQKEQESSSSEEELPQEEQEIQKTQLLKQLQLQQQQQRILKRGIRHLFGDVLRLRKGVHSNPDLL

SEQ ID NO: 263 - protein, 738 aa, Torque teno virus
TAWYRYRRRPWRRRRRPRWGLRRRRFRRSFRGRGRRRYVSRWSRRRYRRRRRRGRRRRGRRRRKRQTLIPRQWQPDVTKKCFITGWMPLIICGTGHTQFNFITHEEDIPGAGASYGGNLTNITITLGGLYEQYMLHRNHWSRSNYDLELARYLGFTLKCYRHATVDYILTYSRTTPFETNELSHMLTHPLLMLLNKHHRVIPSLKTRPKGKRSVRIHIKPPKLMINKWYFAKDLCNIGPCQIYATGLELSNPWLRSGTNSPVIGFWVLKNHLYDGNLSNIASGEQLTARQTLFTTKLLPSNNTKDEWQYAYTPLMKTFYTQAANTAAHNITDKTYNWKNYKTHYDKVQQTWTTKAQFNYDLVKEEYKTVYPTTATFPPEWSNRQYLEHDYGLFSPYFLTPNRYSTEWHMPITYVRYNPLADKGIGNRIYMQWCSESSSSFEPTKSKCMLQDMPLYMLTYGYLDYVVKCTGVKSAWTDMRVAIRSPYTFPQLIGSTDKVGFIPLGEKFMSGDTDPVKNFIPLKYWYRWYPFAANQKSVLETIVSCGPFMPRDQEAGSWDITVGYKATFKRGGSPLPPQPIDDPCQKPTHDLPDPDRHPPRIQISDPARLGPETLFHSWDIRRGYINTKAIKRISDYTESNDYFSTGVVSKRPRLETQYHGQHESQEEDAYLLLKQLQEEQETSSSEGEQAPQEKTLQKEKLLKQLQLHKQQQQLLRKGIRHLLGDVLRLRRGVHWDPGL

SEQ ID NO: 264 - protein, 736 aa, Torque teno virus
TAWWWGRWRQRRWGRRRRRPWRVRRRRPRRSFRRRRRGRYVSRRRRRRYYRRRLRRGRRRGRRKRHRPTLILRQWQPDVVKHCKITGWMPLIICGSGSTQMNFITHMDDTPPMGYTYGGNFVNVTFSLEAIYEQFLYHRNRWSRSNHDLDLARYQGTTLKLYRHATVDYILSYNRTGPFQISEMTYMSTHPAIMLLMKHRIVVPSLRTKPKGRRSIKIRIKPPKLMLNKWYFTKDICSMGLFQLMATGAELTNPWLRDTTKSPVIGFRVLKNSVYTNLSNLKDVSISGERKSILNKIHPETLTGSGNASKGWEYSYTKLMAPIYYSAVRNSTYNWQNYQTHCATTAIKFKEKQTSTLTLIKAEYLYHYPNNVTQVDFIDDPTLTHDFGIYSPYWITPTRISLDWDTPWTYVRYNPLSDKGIGNRIYAQWCSEKSSKLDTTKSKCILKDFPLWCMAYGYCDWVVKCTGVSSAWTDMRVAIICPYTEPALIGSDENVGFIPVSDTFCNGDMPFLAPYIPITWWIKWYPMITHQKEVLEAIVNCGPFVPRDQSSPAWEITMGYKMDWKWGGSPLPSQAIDDPCQKPTHELPDPDRHPRMLQVSDPTKLGPKTVFHKWDWRRGQLSKRSIKRVQEDSTDDEYVTGPLSRKRNKLDTKMPGPPTPEKESYTLLQALQESGQESSSQDEEQAPQKEENQKEALVEQLQLQKQHQRVLKRGLKLLLGDVLRLRRGVHWDPLLS

SEQ ID NO: 265 - protein, 743 aa, Torque teno virus
MAWGWWKRKRRWWWRKRWTRGRLRRRWPRRSRRRPRRRRVRRRRRWRRGRPRRRLYRRGRRYRRKRKRAKITIRQWQPAMTRRCFIRGHMPALICGWGAYASNYTSHLEDKIVKGPYGGGHATFRFSLQVLCEEHLKHHNYWTRSNQDLELALYYGATIKFYRSPDTDFIVTYQRKSPLGGNILTAPSLHPAEAMLSKNKILIPSLQTKPKGKKTVKVNIPPPTLFVHKWYFQKDICDLTLFNLNVVAADLRFPFCSPQTDNVCITFQVLAAEYNNFLSTTLGTTNESTFIENFLKVAFPDDKPRHSNILNTFRTEGCMSHPQLQKFKPPNTGPGENKYFFTPDGLWGDPIYIYNNGVQQQTAQQIREKIKKNMENYYAKIVEENTIITKGSKAHCHLTGIFSPPFLNIGRVAREFPGLYTDVVYNPWTDKGKGNKIWLDSLTKSDNIYDPRQSILLMADMPLYIMLNGYIDWAKKERNNWGLATQYRLLLTCPYTFPRLYVETNPNYGYVPYSESFGAGQMPDKNPYVPITWRGKWYPHILHQEAVINDIVISGPFTPKDTKPVMQLNMKYSFRFTWGGNPISTQIVKDPCTQPTFEIPGGGNIPRRIQVINPKVLGPSYSFRSFDLRRDMFSGSSLKRVSEQQETSEFLFSGGKRPRIDLPKYVPPEEDFNIQERQQREQRPWTSESESEAEAQEETQAGSVREQLQQQLQEQFQLRRGLKCLFEQLVRTQQGVHVDPCLV

SEQ ID NO: 266 - protein, 726 aa, Torque teno virus
MAWGWWKRRRRWWFRKRWTRGRLRRRWPRSARRRPRRRRVRRRRRWRRGRPRRRLYRRYRRKKRRRRKPKTVLKQWQPDITKRCYIIGYIPAIICGAGTWSHNYTSHLLDIIPKGPFGGGHSTMRFSLKVLFEEHLRHLNFWTRSNQDLELVRYFRCSFRFYRDQHTDYLVHYSRKTPLGGNRLTAPSLHPGVQMLSKNKIIVPSYDTKPKGKSYVKVTIAPPTLLTDKWYFSKDICDTTLVNLDVVLCNLRFPFCSPQTDNPCITFSVLHSIYNDFLSIVDTGNYKTQFVSNLSTKVGTDWGKRLNTFRTEGCYSHPKLPKKAVTPGNDKTYFTVPDGLWGDAVFNAEASNIITKNMESYSESAKARGVQGDPAFCHLTGIYSPPWLTPGRISPETPGLYTDVTYNPYADKGVGNRIWVDYCSKKGNKYDNTSKCLLEDMPLWMVTFGYVDWVKKETGNWGIPLWARVLIRCPYTVPKLYNEADPNYGWVPYSYYFGEGKMPNGDLYVPFKIRMKWYPSMWNQEPVLNDLAKSGPFAYKDTKTSVTVTAKYKFTFNFGGNPVPSQIVQDPCTQSTYDIPGTGNLPRRIQVIDPKVLGPHYSFHRWDFRRGLFGQQAIKRVSEQPTTSEFLFSGPKRPRIDQGPYIPPEKGSDSLQRESRPWSNSETEAETEAPSEEEPENQEEQVLQLQLRQQLREQRKLRQGIQCLFEQLITTQQGVHKNPLLE

SEQ ID NO: 267 - protein, 747 aa, Torque teno virus
MAWSWWWRRRKRWWPRRRRRWRRFRTRRARRAVPRRRRRRRVRRRRWGRRRRRRRVFYKRRRRKTGRLYRKPKKKLVLTQWHPTTVRNCSIRGLVPLVLCGHTQGGRNFALRSDDYPKQGSPYGGSFSTTTWNLRVLFDEHQKHHNTWSYPNNQLDLGRYKGCTFYFYRDKKTDYIVKFQRRGPFKINKYSSPMAHPGMMMLDKMKILVPSFDTRPGGRRRVKVTIRPPTLLEDKWYTQQDLAPVNLVSLVVSAASFIHPFSQPQTNNICTTFQVLKDMYYDCIGINSTLTTKYENLFNKLYSKCCYFETFQTIAQLNPGFKAAKKTTNGSGSTAATLGDAVTELKNPNGTFYTGNNSTFGCCTYKPTKEIGSNANKWFWHQLTATDSDTLGQYGRASIKYMEYHTGIYSSIFLSPLRSNLEFPTAYQDVTYNPLTDRGIGNRIWYQYSTKENTTFNETQCKCVLSDLPLWSMFYGYVDFIESELGISAEIHNFGIVCVQCPYTFPPMFDKSKPDKGYVFYDTLFGNGKMPDGSGHVPTYWQQRWWPRFSFQRQVMHDIILTGPFSYKDDSVMTGITAGYKFKFSWGGDMVSEQVIKNPERGDGRDSTYPDRQRRDLQVVDPRSMGPQWVFHTFDYRRGLFGKDAIKRVSEKPTDPDYFTTPYKKPRFFPPTAGEEKLQEEDSALQEKRSPLSSEEGQTRAQVLQQQVLQSELQQQQELGEQLRFLLREMFKTQAGIHMNPRAFQEL

SEQ ID NO: 268 - protein, 747 aa, Torque teno virus; identical to SEQ ID NO: 267

SEQ ID NO: 269 - protein, 745 aa, Torque teno virus
MAWGWWRWRRRWPARRWRRRRRRRPVRRTRARRPARRYRRRRTVRTRRRRWGRRRYRRGWRRRTYVRKGRHRKKKKRLILRQWQPATRRRCTITGYLPIVFCGHTKGNKNYALHSDDYTPQGQPFGGALSTTSFSLKVLFDQHQRGLNKWSFPNDQLDLARYRGCKFYFYRTKQTDWIGQYDISEPYKLDKYSCPNYHPGNMIKAKHKFLIPSYDTNPRGRQKIIVKIPPPDLFVDKWYTQEDLCSVNLVSLAVSAASFLHPFGSPQTDNPCYTFQVLKEFYYQAIGFSATDQQREKVFDILYKNNSYWESNITPFYVINVKKGSNTTQYMSPQISDSSFRKKVNTNYNWYTYDAKTNASQLKQLRNAYFKQLTSEGPQHTYSDNGYASQWTTPSTDAYEYHLGMFSTIFLAPDRPVPRFPCAYQDVTYNPLMDKGVGNHVWFQYNTKADTQLIVTGGSCKAHIQDIPLWAAFYGYSDFIESELGPFVDADTVGLICVICPYTKPPMYNKTNPMMGYVFYDRNFGDGKWTDGRGKIEPYWQVRWRPEMLFQETVMADIVQTGPFSYKDELKNSTLVCKYKFYFTWGGNMMFQQTIKNPCKTDGQPTDSSRHPRGIQVADPEQMGPRWVFHSFDWRRGYLSEKALKRLQEKPLDYDEYFTQPKRPRIFPPTESAEGEFREPEKGSYSEEERSQASAEEQTEEATVLLLKRRLREQQQLQQQLQFLTREMFKTQAGLHINPMLLNQR

SEQ ID NO: 270 - protein, 745 aa, Torque teno virus
MAWGWWRWRRRWPARRWRRRRRRRPVRRTRARRPARRYRRRRTVRTRRRRWGRRRYRRGWRRRTYVRKGRHRKKKKRLILRQWQPATRRRCTITGYLPIVFCGHTKGNKNYALHSDDYTPQGQPFGGALSTTSFSLKVLFDQHQRGLNKWSFPNDQLDLARYRGCKFYFYRTKQTDWIGQYDISEPYKLDKYSCPNYHPGNMIKAKHKFLIPSYDTNPRGRQKIIVKIPPPDLFVDKWYTQEDLCSVNLVSLAVSAASFLHPFGSPQTDNPCYTFQVLKEFYYQAIGFSATDEQREKVFDILYKNNSYWESNITPFYVINVKKGCNTTQYMSPQISDSSFRKKVNTNYNWYTYDAKTNASQLKQLRNAYFKQLTSEGPQHTYSDNGYASQWTTPSTDAYEYHLGMFSTIFLAPDRPVPRFPCAYQDVTYNPLMDKGVGNHVWFQYNTKADTQLIVTGGSCKAHIQDIPLWAAFYGYSDFIESELGPFVDADTVGLICVICPYTKPPMYNKTNPMMGYVFYDRNFGDGKWTDGRGKIEPYWQVRWRPEMLFQETVMADIVQTGPFSYKDELKNSTLVCKYKFYFTWGGNMMFQQTIKNPCKTDGQPTDSSRHPRGIQVADPEQMGPRWVFHSFDWRRGYLSEKALKRLQEKPLDYDQYFTQPKRPRIFPPTESAEGEFREPEKGSYSEEERLQASAEEQTEEATVLLLKRRLREQQQLQQQLQFLTREMFKTQAGLHINPMLLNQR

SEQ ID NO: 271 - protein, 745 aa, Torque teno virus
MAWGWWRWRRRWPARRWRRRRRRRPVRRTRARRPARRYRRRRTVRTRRRRWGRRRYRRGWRRRTYVRKGRHRKKKKRLILRQWQPATRRRCTITGYLPIVFCGHTKGNKNYALHSDDYTPQGQPFGGALSTTSFSLKVLFDQHQRGLNKWSFPNDQLDLARYRGCKFYFYRTKQTDWIGQYDISEPYKLDKYSCPNYHPGNMIKAKHKFLIPSYDTNPRGRQKIIVKIPPPDLFVDKWYTQEDLCSVNLVSLAVSAASFLHPFGSPQTDNPCYTFQVLKEFYYQAIGFSATDEQREKVFDILYKNNSYWESNITPFYVINVKKGCNTTQCMSPQISDSSFRKKVNTNYNWYTYDAKTNASQLKQLRNAYFKQLTSEGPQHTYSDNGYASQWTTPSTDAYEYHLGMFSTIFLAPDRPVPRFPCAYQDVTYNPLMDKGVGNHVWFQYNTKADTQLIVTGGSCKAHIQDIPLWAAFYGYSDFIESELGPFVDADTVGLICVICPYTKPPMYNKTNPMMGYVFYDRNFGDGKWTDGRGKIEPYWQVRWRPEMLFQETVMADIVQTGPFSYKDELKNSTLVCKYKFYFTWGGNMMFQQTIKNPCKTDGQPTDSSRHPRGIQVADPEQMGPRWVFHSFDWRRGYLSEKALKRLQEKPLDYDQYFTQPKRPRIFPPTESAEGEFREPEKGSYSEEERSQASAEERTEEATVLLLKRRLREQQQLQQQLQFLTREMFKTQAGLHINPMLLNQR

SEQ ID NO: 272 - protein, 726 aa, Torque teno virus
MAWRWWKRRRRWWFRKRWTRGRLRRRWPRPARRRPRRRRVRRRRRWRRGRPRRRLYRRYRRKKRRRRKPKIILKQWQPDIVKRCYIVGYIPAIICGAGTWSHNYTSHLLDIIPKGPFGGGHSTMRFSLKVLSEEHLRHLNFWTKSNQDLELIRYFRCSFKFYRDQDTDYIVHYSRKTPLGGNRLTAPNLHPGVQMLSKNKIIVPSYATKPKGPSYIKVTIAPPTLLTDKWYFSKDVCDTTLVNLDVVLCNLRFPFCSPQTDNPCITFQVLHSIYNDFLSIVDTNNYKESFVSALPTKVSTDWGKRLNTFRTEGCYSHPKLHKKAVTAATDTEYFTKPDGLWGDTIFDVENGQKIIKNMESYAKSAKERGINGDPAFCHLTGIYSPPWLTPGRISPETPGLYTDVTYNPYADKGVGNRIWVDYCSKKGNKYDNTSKCLLEDMPLWMVCFGYVDCVKKETGNWGIPLWARVLIRSPYTVPKLYNEADPNYGWVPIFYYFGEGKMPNGDMYIPFKIRMKWYPSMWNQEPVLNDLAKSGPFAYKNTKTSVTVTAKYKFTFNFGGNPVPSQIVQDPCTQPTYDIPGTGNLPRRIQVIDPKVLSPHYSFHRWDFRRGLFGSQAIKRVSEQSTTSEFLFSGPKKPRIDQGPYIPPEKGSGSLQREPRPWSSSETEAETEAPSEEEPENQEEQVLQLQLRQQLREQRKLRQGIQCLFEQLITTQQGVHKNPLLE

SEQ ID NO: 273 - protein, 726 aa, Torque teno virus
MAWRWWKRRRRWWFRKRWTRGRLRRRWPRPARRRPRRRRVRRRRRWRRGRPRRRLYRRYRRKKHRRRKPKIILKQWQPDIVKRCYIVGYIPAIICGAGTWSHNYTSHLLDIIPKGPFGGGHSTMRFSLKVLFEEHLRHLNFWTKSNQDLELIRYFRCSFKFYRDQDTDYIVHYSRKTPLGGNRLTAPNLHPGVQMLSKNKIMVPSYATKPKGPSYIKVTIAPPTLLTDKWYFSKDVCDTTLVNLDVVLCNLRFPFCSPQTDNPCITFQVLHSIYNDFLSIVDTNNYKESFVSALPTKVSTDWGKRLNTFRTEGCYSHPKLHKKAVTAATDTEYFTKPDGLWGDTIFDVENGQKIIKNMESYAKSAKERGINGDPAFCHLTGIYSPPWLTPGRISPETPGLYTDVTYNPYADKGVGNRIWVDYCSKKGNKYDNTSKCLLEDMPLWMVCFGYVDWVKKETGNWGIPLWARVLIRSPYTVPKLYNEADPNYGWVPISYYFGEGKMPNGDMYIPFKIRMKWYPSMWNQEPVLNDLAKSGPFAYKNTKTSVTVTAKYKFTFNFGGNPVPSQIVQDPCTQPTYDIPGTGNLPRRIQVIDPKVLGPHYSFHRWDFRRGLFGSQAIKRVSEQSTTSEFLFSGPKKPRIDQGPYIPPEKGSGSLQREPRPWSSSETEAETEAPSEEEPENQEEQVLQLQLRQQLREQRKLRQGIQCLFEQLITTQQGVHKNPLLE

SEQ ID NO: 274 - protein, 726 aa, Torque teno virus
MARRWWKRRRRWWFRKRWTRGRLRRRWPRPARRRPKRRRVRRRRRWRRGRPRRRLYRRYRRKKRRRRKPKIILKQWQPDIVKRCYIVDYIPAIICGAGTWSRNYTSHLLDIIPKGPFGGGHSTMRFSLKVLFEEHLRHLNFWTKSNQDLELIRYFRCSFKFYRDQDTDHIVHYSRKTPLGGNRLTAPNLHPGVQMLSKNKIIVPSYATKPKGPSYIKVTIAPPTLLTDKWYFSKDVCDTTLVNLDVVLCNLRFPFCSPQTDNPCITFQVLHSIYNDFLSIVDTNNYKESFVAALPTKVSTDWGKRLNTFRTEGCYSHPKLHKKAVTAATDTEYFTKPDGLWGDTIFDVENGQKIIKNMESYAKSAKERGINGDPAFCHLTGIYSPPWLTPGRISPETPGLYTDVTYNPYADKGVGNRIWVDYCSKKGNKYGNTSKCLLEDMPLWMVCFGYVDWVKKETGNWGIPLWARVLIRSPYTVPKLYNEADPNYGWVPISYYFGEGKMPNGDMYVPFKIRMKWYPSMWNQEPVLNDLAKSGPFAYKNTKTSVTVTAKYKFTFNFGGNPVPSQIVQDPCTQPTYDIPGTGNLPRRIQVIDPKVLGPHYSFHRWDFRRGLFGSQAIKRVSEQSTTSEFLFSGPKKPRIDQGPYIPPEKGSGSLQREPRPWSSSETEAETEAPSEEEPENQEEQVLQLQLRQQLREQRKLRQGIQCLFEQLITTQQGVHKNPLLE

SEQ ID NO: 275 - protein, 726 aa, Torque teno virus
MAWRWWKRRRRWWFRKRWTRGRLRRRWPRPARRRPKRRRVRRRRRWRRERPRRRLYRRYRRKKRRRRKPKIILKQWQPDIVKRCYIVGYIPAIICGAGTWSHNYTSHLLDIIPKGPFGGGHSTMRFSLKVLFEEHLRHLNFWTKSNQDLELIRYFRCSFKFYRDQDTDYIVHYSRKTPLGGNRLTAPNLHPGVQMLSKNKIIVPSYATKPKGPSYIKVTIAPPTLLTDKWYFSKDVCDTTLVNLDVVLCKLRFPFCSPQTDNPCITFQVLHSIYNDFLSIVDTNNYKESFVAALPTKVSTDWGKRLNTFRTEGCYSHPKLHKKAVTAATDTEYFTKPDGLWGDTIFDVENGQKIIKNMESYAKSAKERGINGDPAFCHLTGIYSPPWLTPGRISPETPGLYTDVTYNPYADKGVGDRIWVDYCSKKGNKYDNTSKCLLEDMPLWMVCFGYVDWVKKETGNWGIPLWARVLIRSPYTVPKLYNEADPNYGWVPISYYFGEGKMPNGDMYVPFKIRMKWYPSMWNQEPVLNDLAKSGPFAYKNTKTSVTVTAKYKFTFNFGGNPVPSQIVQNPCTQPTYDIPGTGNLPRRTQVIDPKVLGPHYSFHRWDFRRGLFGSQAIKRVSEQSTTSEFLFSGPKKPRIDQGPYIPPEKGSGSLQREPRPWSSSETEAETEAPSEEEPENQEEQVLQLQLRQQLREQRKLRQGIQCLFEQLITTQQGVHKNPLLE

SEQ ID NO: 276 - protein, 743 aa, Torque teno virus
MAWGWWKRRRRRWWRGLWRRRRFARRRPRRPARRPRRRRVRRRRRWRRGRLRRRVYNRRRRIRRKRRRQKLTIRQWQPDKRRICRIKGYLPAIIYGDGTFSKNYTSHLEDRISKGPFGGGHGTARMSLKVLYDDHLKGLNIWTYSNKDLELVRYMHTTITFYRHPDTDFIAVYNRKTPLGGNRYTAPSLHPGNMMLQRTKILIPSFKTKPRGSGKIRVVIKPPTLLVDKWYFQKDICDVTLFNLNITAASLRFPFCSPQTNNPCVTFQVLHSVYDKALGINTFGTKETPEDQQMEDIKNWLTKALNTAGFTVLNTFRTEGIYSHPQLKKPPEGSNKPSAEQYFAPLDSLWGDKIYVNNNTSPSQTEATIPGILARNACTYYQKAKTSTLRQHLGAMAHCHLTGIFNPALLTQGRLSPEFFGLYKEIIYNPYDDKGKGNRIWIDPLTKPDNIFDARSKVELEDMPLWMACFGYNDWCKKELNNWGLEVEYRVLLRCPYTYPKLYNDANPNYGYVPISYNFSAGKTVEGDLYVPIMWRTKWHPTMYNQSPVLEDLAMAGPFAPKEKIPSSTLTIKYKAKFIFGGNPISEQIVKDPCTQPTYEIPGGGTLPRRIQVINPEYIGPHYSFKSFDIRRGYFSAKSVKRVSEQSDITEFIFSGPKKPRIDQDRYQEAEEHSDSRLREEKPWESSQETESEAQEEEIQETNIQLQLQHQLKEQLQLRRGIQCLFEQLTKTQQGVHINPSLV

SEQ ID NO: 277 - protein, 603 aa, Torque teno virus
MSLKVLYDDHLKGLNIWTYSNKDLELVRYMHTTITFYRHPDTDFIAVYNRKTPLGGNRYTAPSLHPGNMMLQRTKILIPSFKTKPRGSGKIRVVIKPPTLLVDKWYFQKDICDVTLFNLNITAASLRFPFCSPQTNNPCVTFQVLHSVYDKALGINTFGTKETPEDQQMEDIKNWLTKALNTAGFTVLNTFRTEGIYSHPQLKKPPEGSNKPSAEQYFAPLDSLWGDKIYVNNNTSPSQTEATIPGILARNACTYYQKAKTSTLRQHLGAMAHCHLTGIFNPALLTQGRLSPEFFGLYKEIIYNPYDDKGKGNRIWIDPLTKPDNIFDARSKVELEDMPLWMACFGYNDWCKKELNNWGLEVEYRVLLRCPYTYPKLYNDANPNYGYVPISYNFSAGKTVEGDLYVPIMWRTKWYPTMYDQSPVLEDLAMAGPFAPKEKIPSSTLTIKYKAKFIFGAILYLNRLSRTPAPSPPTKFPEAVRSLAEYKSLTRNTSGHTTHSKASTSDVGTLARRVLKECQNNQTLLSLYSQVQKSQGSTKTGTKKQKNTQILDSEKRNRGRARKKQRAKPKKKRYKRQTSSSSCSTSSKSNCSSDGESSASSSN

SEQ ID NO: 278 - protein, 732 aa, Torque teno virus
MAWRWWWRRRRPWRWRWRRRRRPARRRRRRRPARRARRPRVRRWRRRRVWAPRPYIRRRRRSFRRKKIKITQWNPAVTKKCTVTGYLPVIYCGTGDIGTTFQNFGSHMNEYKQYNAAGGGFSTMLFTMQNLYEEYQKHRCRWSKSNQDLDLCRYLDCKLTFYRSPNTDFIVGYNRKPPFIDTQITRCTLHPGMLIQERKKVIIPSFQTRPKGRIKRKIKVRPPTLFTDKWYFQRDLCKVPLVTVSASAASLRFPFGSPQTENYCIYFQVLDPWYHTRLSITGGKPAEYWTQLKAYLTQGWGRSTNNAGYQHGPLGTYFNTLKTSEHIRQPPADNYKQANKDTTYYGRVDSHWGDHVYQQTIIQAMEENQSNMYTKRALHTFLGSQYLNFKSGLFSSIFLDNARLSPDFKGMYQEVVYNPFNDRGVGNKVWVQWCTNEDTIFKDLPGRVPVVDLPLWCALMGYSDYCKKYFHDDGFLKEARITIISPYTNPPLINNKNTNEGFVPYSFYFGKGRMPDGNGYIPIDFRFNWYPCIFHQTNWINDMVQCGPFAYHGDEKNCSLTMKYKFKFLFGGNPISQQTIKDPCQQPDWQLPGSGRFPRDVQVSNPRLQTEGSTFHAWDFRRGFYGKRAIERLQGQQDDVTYIAGPPKRPRFEVPALAAEGSSNTRRSELPWQTSEEESSQEENSEETEEETSLSQQLKQQCIEQKLLKRTLHQLVKQLVKTQYHLHAPIIH

SEQ ID NO: 279 - protein, 726 aa, Torque teno virus
MAWRWWKRRRRWWFRKRWTRGRLRRRWPRPARRRPRRRRVRRRRRWRRGRPRRRLYRRYRRKKRRRRKPKIILKQWQPDIVKRCYIIGYIPAIICGAGTWSHNYTSHLLDIIPKGPFGGGHSTMRFSLKVLFEEHLRHLNFWTKSNQDLELIRYFRCSFKFYRDQDTDYIVHYSRKTPLGGNRLTAPSLHPGVQMLSKNKILVPSYATKPKGGSYVKVTIAPPTLLTDKWYFSKDVCDTTLVNLDVVLCNLRFPFCSPQTDNPCITFQVLHSYYNDYLSIVDTALYKTSFVNNLSTKLGTTWANRLNTFRTEGCYSHPKLLKKTVTAANDTKYFTTPDGLWGDAVFDVSDAKKLTKNMESYAASANERGVQGDPAFCHLTGIFSPPWLTPGRISPETPGLYTDVTYNPYADKGVGNRIWVDYCSKKGNKYDNTSKCVLEDMPLWMLCFGYVDWVKKETGNWGIPLWARVLIRSPYTVPKLYHENDPDYGWVPISYYFGEGKMPNGDMYVPFKVRMKWYPSMWNQEPVLNDLAKSGPFAYKNTKTSVTVTAKYKFTFNFGGNPVPSQIVQDPCTQPTYDIPGTGNLPRRIQVIDPKVLGPHYSFHRWDFRRGLFGTQAIKRVSEQSTTSEFLFSGPKKPRIDQGPYIPPEKGSGSLQRESRPWSSSETEAETEAPSEEEPENQEEQVLQLQLRQQLREQRKLRQGIQCLFEQLITTQQGVHKNPLLE

SEQ ID NO: 280 - protein, 760 aa, Torque teno virus
MAWWGRWRRWRWRPRRWRRRRRRRVPRRRAQRSVRRRRARRVRRRRWGRRRWRRGYRRRLRLRRKRKRKRRLVLTQWHPAKVRRCRISGVLPMILCGAGRSSFNYGLHSDDFTKQKPNNQNPHGGGMSTVTFNLKVLFDQYERFMNKWSYPNDQLDLARYKGCKFTFYRHPEVDFLAQYDNVPPMKMDELTAPNTHPALLLQSRHRVKIYSWKTRPFGSKKVTVKIGPPKLFEDKWYSQSDLCKVSLVSWRLTACDFRFPFCSPQTDNPCVTFQVLGEQYYEVFGTSVLDVPASYNSQITTFEQWLYKKCTHYQTFATDTRLAPQKKATTSTNHTYNPSGNTESSTWTQSNYSKFKPGNTDSNYGYCSYKVDGETFKAIKNYRKQRFKWLTEYTGENHINSTFAKGKYDEYEYHLGWYSNIFIGNLRHNLAFRSAYIDVTYNPTVDKGKGNIVWFQYLTKPTTQLIRTQAKCVIEDLPLYCAFFGYEDYIQRTLGPYQDIETVGVICFISPYTEPPCIRKEEQKKDWGFVFYDTNFGNGKTPEGIGQVHPYWMQRWRVMAQFQKETQNRIARSGPFSYRDDIPSATLTANYKFYFNWGGDSIFPQIIKNPCPDTGLRPSGHREPRSVQVVSPLTMGPEFIFHRWDWRRGFYNPKALKRMLEKSDNDAESSTGPKVPRWFPAHHDQEQESDFDSQETRSQSSQEEAAQEALQDVQETSVQQYLLKQFREQRLLGQQLRLLMLQLTKTQSNLHINPRVLDHA

SEQ ID NO: 281 - protein, 739 aa, Torque teno virus
MFWWGWRRRWWWKPRRRWRRRRARRPRRVPRRRYRRAARRYRGRRVRRRRAGGWRGRRRYSRHYSRRLTVRRKKKKLTLKIWQPQNIRKCRIRGLLPLLICGHTRSAFNYAIHSDDKTPQQESFGGGLSTVSFSLKVLFDQNQRGLNRWSASNDQLDLARYLGCTFWFYRDKKTDFIVQYDISAPFKLDKNSSPSYHPFMLMKAKHKVLIPSFDTKPKGREKIKVRIQPPKMFIDKWYTQEDLCPVILVSLAVSVASFTHPFCSPQTANPCITFQVLKEFYYPAMGYGAPETTVTSVFNTLYTTATYWQSHLTPQFVRMPTKNPDNTENNQAQAFNTWVDKDFKTGKLVKYNFPQYAPSIEKLKQLRTYYFEWETKHTGVAAPPTWTTPTSDRYEYHMGMFSPTFLTPFRSAGLDFPGAYQDVTYNPLTDKGVGNRMWFQYNTKIDTQFDARSCKCVLEDMPLYAMAYGYADFLEQEIGEYQDLEANGYVCVISPYTKPPMFNKHNPQQGYVFYDSQWGNGKWIDGTGFVPVYWLTRWRVELLFQKKVLSDIAMSGPFSYPDELKNTVLTAKYRFDFKWGGNLFHQQTIRNPCKPEETSTGRVPRDVQVVDPVTMGPRFVFHSWDWRRGFLSDRALKRMFEKPLDLEGFAASPKRPRIFPPTEGQLAREQKEQEESSDSQEESSLTSLEEVPEETKLRLHLRKQLREQRSIRQQLRTMFQQLVKTQAGLHLNPLLSSQL

SEQ ID NO: 282 - protein, 767 aa, Torque teno virus
MAWRWWWQRRWRRRPWPRRRWRRLRRRRPRRPVRRRRRRATVRRRRWRGRRGRRTYTRRAVRRRRRPRKRFVLTQWSPQTARNCSIRGIVPMVICGHTRAGRNYALHSEDFTTQIRPFGGSFSTTTWSLKVLWDEHQKFQNRWSYPNTQLDLARYRGVTFWFYRDQKTDYIVQWSRNPPFKLNKYSSPMYHPGMMMQAKKKLVVPSFQTRPKGKKRYRVRIRPPNMFNDKWYTQEDLCPVPLVQIVVSAATQTKKNCSPQTNNPCITFQVLKDKYLNYIGVNSSETRRNSYKTLQEKLYSQCTYFQTTQVLAQLSPAFQPAKKPNRTNNSTSTTLGNKVTDLKSNNGKFHTGNNPVFGMCSYKPSKDILYKANEWLWDNLMVENDLHSTYGKATLKCMEYHTGIYSSIFLSPQRSLEFPAAYQDVTYNPNCDRAIGNRVWFQYGTKMNTNFNEQQCKCVLTNIPLWAAFNGYPDFIEQELGISTEVHNFGIVCFQCPYTFPPLYDKKNPDKGYVFYDTTFGNGKMPDGSGHIPIYWQQRWWIRLAFQVQVMHDFVLTGPFSYKDDLANTTLTARYKFRFKWGGNIIPEQIIKNPCKREQSLGSYPDRQRRDLQVVDPSTMGPIYTFHTWDWRRGLFGADAIQRVSQKPEDALRFTNPFKRPRYLPPTDGEDYRQEEDFALQERRRRTSTEEVQDEESPPQNAPLLQQQQQQRELSVQHAEQQRLGVQLRYILQEVLKTQAGLHLNPLLLGPPQTRCISLSPPEAYSP

SEQ ID NO: 283 - protein, 770 aa, Torque teno virus
MAAWWWGRRRRWRRWRRRRLPRRRRWRRRRRWPRRRRRRWPRRRRRRRPARRPRRRRRRRRVRRPRRRQKLVLTQWNPQTVRKCIIRGFVPLFQCSRTAYHRNFVDHMDDVYTTGPFGGGTGSMLFTLSFFYHEFKKHHCKWSASNRDFDLCRYRGTVLKFYRHPDVDYIVWLNRNPPFQENLLDAMSRQPLIMLQTHKCILVRSFKTHPRGPSYVRMKVRPPRLLTDKWYFQSDFCNVPLFQLQFALAELRFPIGSPQTNTTCVNFLVLDNRYHLFLDNKPQQSDNSQREERGHGYPFNGSEGEADRLKFWHSLWNTGRFLNTTHINTLQPNISKLQEHKAEDTEAKTTYKSLINGNKKVYNDSQYMQNVWAQNKINTLYEAIAEEQYRKIQKYYNTTYGQYQRQLFTGKKYWDYRVGMFSPTFLSPSRLNPEMPGAYTEIAYNPWTDEGTGNVVCLQYLTKETSDYKPHAGSKFTIEDVPLWIAMNGYVDICKKEGKDPGIRLNCLMCIRCPYTRPKLYNPRYPKELFVVYSYNFAHGRMPGGDKYIPMEFKDRWYPSLMHQEEVIEDIVRSGPFALKDQTEMVTCMMRYSALFNWGGNIIREQAVEDPCKKNTFALPGASGVARLLQVSNPIRQTPSTTWHSWDWRRSLFTQTGIKRMREQQPYDEITYAGPKRPKLTVPAGPTLAAGDAYNYWERKPLTSPGETLPTQTETETEAPEEEAQQEEVQEGLQLQQLWEQQLQQKRQLGVMFQQLLRLRTGAEIHPALA

SEQ ID NO: 284 - protein, 770 aa, Torque teno virus
MAAWWWGRRRRWRRWRRRRLPRRRRWRRRRRWPRRRRRRWPRRRRRRRPARRPRRRRRRRRVRRPRRRQKLVLTQWNPQTVRKCIIRGFVPLFQCSRTACHRNFVDHMDDVYTTGPFGGGTGSMLFTLSFFYHEFKKHHCKWSASNRDFDLCRYRGTVLKFYRHPDVDYIVWLNRNPPFQENLLDAMSRQPLIMLQTHKCILVRSFKTHPRGPSYVRMKVRPPRLLTDKWYFQSDFCNVPLFQLQFALAELRFPIGSPQTNTTCVNFLVLDNRYHLFLDNKPQQSENLQRKERGHGYSFTGNEGEVDRLKFWHSLWNTGRFLNTTHINTLLPNISKLQEHKAEDRQANAKYKNLINGNKKVYNDSQYMQNVWEENKINTLYDAIAEEQYRKIQKYYNTTYGQYQRQLFTGKKYWDYRVGMFSPTFLSPSRLNPEMPGAYTEIAYNPWTDEGTGNVVCLQYLTKETSDYKPHAGSKFTIEDVPLWIAMNGYVDICKKEGKDPGIRLNCLMCIRCPYTRPKLYNPRYPEELFVVYSYNFAHGRMPGGDKYIPMEFKDRWYPSLMHQEEVIEDIVRSGPFALKDQTEMVTCMMRYSALFNWGGNIIREQAVEDPCKKNTFALPGASGVARLLQVSNPIRQTPSTTWHSWDWRRSLFTQTGIKRMREQQPYDEITYAGPKRPKLTVPAGPTLAAGDAYNYWERKPLTSPGETLPTQTDTETEAPEEEAQQEEVQEGLQLQQLWEQQLQQKRQLGVMFQQLLRLRTGAEIHPALA

SEQ ID NO: 285 - protein, 770 aa, Torque teno virus
MAAWWWGRRRRWRRWRRRRLPRRRRWRRRRRWPRRRRRRWPRRRRRRRPARRPRRRRRRRRVRRPRRRQKLVLTQWNPQTVRKCIIRGFVPLFQCSRTAYHRNFVDHMDDVYTTGPFGGGTGSMLFTLSFFYHEFKKHHCKWSASNRDFDLCRYRGTVLKFYRHPDVDYIVWLNRNPPFQEDLLDAMSRQPLIMLQTHKCILVRSFKTHPRGPSYVRMKVRPPRLLTDKWYFQSDFCNVPLFQLQFALAELRFPIGSPQTNTTCVNFLVLDNRYHLFLDNKPQQSDNPQRKERGHGYSFTGNEGEMDRERFWHSLWSTGRFLNTTHINTLLPNISKLQDHKAEDKDAKTTYKSLINDNKKVYNDSQYMQNVWDQNKIHTLYMAIAEEQYRKIQKYYNTTYGQYQRQLFTGKKYWDYRVGMFSPTFLSPSRLNPEMPGAYTEIAYNPWTDEGTGNVVCLQYLTKETSDYKPHAGSKFTIEDVPLWIAMNGYVDICKKEGKDPGIRLNCLMCIRCPYTRPKLYNPRYPEELFVVYSYNFAHGRMPGGDKYIPMEFKDRWYPSLMHQEEVIEDIVRSSPFALKDQTEMVTCMMRYSALFNWGGNIIREQAVEDPCKKNTFALPGASGVARLLQVSNPIRQTPSTTWHSWDWRRSLFTQTGIKRMREQQPYDEITYAGPKRPKLTVPAGPTLAAGDAYNYWERKPLTSPGETLPTQTETETEAPEEEAQQEEVQEGLQLQQLWEQQLQQKRQLGVMFQQLLRLRTGAEIHPALA

SEQ ID NO: 286 - protein, 770 aa, Torque teno virus
MAAWWWGRRRRWRRWRRRRLPRRRRWRRRRRWPRRRRRRWPRRRRRRRPARRPRRRRRRRRVRRPRRRQKLVLTQWNPQTVRKCIIRGFVPLFQCSRTAYHRNFVDHMDDVYTTGPFGGGAGSMLFTLSFFYHEFKKHHCKWSASNRDFDLSRYRGAVLKFYRHPDVDYIVWLNRNPPFQENLLDAMSRQPLIMLQTHKCILVRSFKTHPRGPSYVRMKVRPPRLLTDKWYFQSDFCNVPLFQLQFALAELRFPIGSPQTNTTCVNFLVLDNRYHSFLDNKPQQSENSQRKERGHGYSFTGKEGEQDRLTFWQSLWNTGRFLNTTHINTLLPNISKLQDHKAEDTDANPDYKSLINGNKKVYNDSQYMQNVWQQGKINTLCNAIAQEQYRKIQKYYNTTYGQYQRQLFTGKKYWDYRVGTFSPTFLSPSRLNPEMPGAYTEIAYNPWTDEGTGNVVCLQYLTKETSDYKPHAGSKFTIEDVPLWIAMNGYVDICKKEGKDPGIRLNCLMCIRCPYTRPKLYNPRYPEELFVVYSYNFSHGRMPGGDKYIPMEFKDRWYPSLMHQEEVIEDIVRSGPFALKDQTDMVTCMMRYSALFNWGGNIIREQAVEDPCKKNTFALPGASGVARLLQVSNPIRQTPSTTWHSWDWRRSLFTQTGIKRMREQQPYDEITYAGPKRPKLTVPAGPTLAAGDAYNYWERKPLTSPGETLPTQTETETEAPEEEAQQEEVQEGLQLQQLWEQQLQQKRQLGVMFQQLLRLRTGAEIHPALA

SEQ ID NO: 287 - protein, 770 aa, Torque teno virus
MAAWWWGRRRRWRRWRRRRLPRRRRWRRRRRWPRRRRRRWPRRRRRRRPARRPRRRRRRRRVRRPRRRQKLVLTQWNPQTVRKCIIRGFVPLFQCSRTAYHRNFVDHMDDVYTTGPFGGGTGSMLFTLSFFYHEFKKHHCKWSASNRDFDLCRYRGTVLKFYRHPDVDYIVWLNRNPPFQENLLDAMSRQPLIMLQTHKCILVRSFKTHPRGPSYVRMKVRPPRLLTDKWYFQSDFCNVPLFQLQFALAELRFPIGSPQTNTTCVNFLVLDNRYHLFLDNKPRQSENLQRKERGHGYVFTGNEGEDDRLKFWHSLWSTGRFLNTTHINTLLPNISKLQDHEAEDTQAKTDYKSLINGNKKVYNDSQYMQDVWEQKKIQTLYKVIAEEQYRKIEKYYNTTYGQYQRQLFTGKKYWDYRVGMFSPTFLSPSRLNPEMPGAYTEIAYNPWTDEGTGNVVCLQYLTKETSDYKPHAGSKFTIEDVPLWIAMNGYVDICKKEGKDPGIRLNCLMCIRCPYTRPKLYNPRYPEELFVVYSYNFAHGRMPGGDKYIPMEFKDRWYPSLMHQEEVIEDIVRSGPFALKDQTEMVTCMMRYSALFNWGGNIIREQAVEDPCKKNTFALPGASGVARLLQVSNPIRQTPSTTWHSWDWRRSLFTQTGIKRMREQQPYDEITYAGPKRPKLTVPAGPTLAAGDAYNYWERKPLTSPGETLPTQTETETEAPEEEAQQEEVQEGLQLQQLWEQQLQQKRQLGVMFQQLLRLRTGAEIHPALA

SEQ ID NO: 288 - protein, 736 aa, Torque teno virus
MAAWWWGRRRRWRRWRRRRLPRRRRWRRRRRWPRRRRRRWPRRRRRRGPARRLRRRRRRRRVRRPRRRQKLVLTQWNPQTQRKCVVRGFLPLFFCGQGAYHRNFVEHMDDVFPKGPSGGGFGSMVWNLDFLYQEFKKHHNKWSSSNRDFDLVRCHGTVIKFYRHSDFDYLVHVTRTPPFKEDLLTIVSHQPGLMMQNYRCILVKSYKTHPGGRPYITPKIRPPRLLTDKWYFRPDFCGVPLFKLYVTLAELRFPICSPQTDTNCVTFLVLDNTYYDYLDNTADTTRDHERQQKWTNMKMTPRYHLTSHINTLFSGTQQMQSAKETGKDSQFRENIWKTAEVVKIIKDIASKNMQKQQTYYTKTYGAYATQYFTGKQYWDWRVGLFSPIFLSPSRLNPQEPGAYTEIAYNPWTDEGTGNIVCIQYLTKKDSHYKPGAGSKFAVTDVPLWAALFGYYDQCKKESKDANIRLNRLLLVRCPYTRPKLYNPRDPDQLFVMYSYNFGHGRMPGGDKYVPMEFKDRWYPCMLHQEEVVEEIVRCGPFAPKDMTPSVTCMARYSSLFTWGGNIIREQAVEDPCKKSTFAIPGAGGLARILQVSNPQRQAPTTTWHSWGWRRSLFTETGLKRMQEQQPYDEMSYTGPKRPKLSVPPAAEGNLAAGGGLFFRDGKQPASPGGSLPTQSETEAEAEDEEAHQEETEEGAQLQQLWEQQLQQKRELGIVFQHLLRLRQGAEIHPGLV

SEQ ID NO: 289 - protein, 736 aa, Torque teno virus
  MOD_RES (20)..(20): Any amino acid
MAAWWWGRRRRWRRWRRRRXPRRRRWRRRRRWPRRRRRRWPRRRRRRRPARRLRRRRRRRRVRRPRRRQKLVLTQWNPQTQRKCVVRGFLPLFFCGQGAYHRNFVEHMDDVFPKGPSGGGFGSMVWNLDFLYQEFKKHHNRWSSSNRDFDLVRYHGTVIKFYRHSDFDYLVHVTRTPPFKEDLLTIVSHQPGLMMQNYRCILVKSYKTHPGGRPYITLKIRPPRLLTDKWYFQPDFCGVPLFKLYVTLAELRFPICSPQTDTNCVTFLVLDNTYYDYLDSTADTTRDNERHQKWKNMIMTPRYHLTSHINTLFSGTQQMQNAKETGKDSQFRENIWKTEEVVKIIHDIASRNMQKQITYYTKTYGAYATQYFTGKQYWDWRVGLFSPIFLSPSRLNPQEPGAYTEIAYNPWTDEGTGNIVCIQYLTKKDSHYKPGAGSKFAVTDVPLWAALFGYYDQCKKESKDANIRLNCLLLVRCPYTRPKLYNPRDPDQLFVMYSYNFGHGRMPGGDKYVPMEFKDRWYPCMLHQEEVVEEIVRCGPFAPKDMTPSVTCMARYSSLFTWGGNIIREQAVEDPCKKSTFAIPGAGGLARILQVSNPQRQAPTTTWHLWDWRRSLFTETGLKRMQEQQPYDEMSYTGPKRPKLSVPPAAEGNLAAGGGLFFRDRKQPTSPGGSLPTQSETEAEAEDEEAHQEETEEGAQLQQLWEQQLQQKRELGIVFQHLLRLRQGAEIHPGLV

SEQ ID NO: 290 - protein, 733 aa, Torque teno virus
MAWWWWRRRRRPWRRRWRWKRRARVRTRRPRRAVRRRRRRVRRRRRGWRRLYRRWRRKGRRRRRRKKLVMKQWNPSTVSRCYIVGYLPIIIMGQGTASMNYASHSDDVYYPGPFGGGISSMRFTLRILYDQFMRGQNFWTKTNEDLDLARFLGSKWRFYRHKDVDFIVTYETSAPFTDSLESGPHQHPGIQMLMKNKILIPSFATKPKGRSSIKVRIQPPKLMIDKWYPQTDFCEVTLLTIHATACNLRFPFCSPQTDTSCVQFQVLSYNAYRQRISILPELCTREKLREFIKQVVKPNLTCINTLATPWCFKFPELDKLPPVANNATGWSVNPDSGDGDVIYQETTLETKWIANNDVWHTKDQRAHNNIHSQYGMPQSDALEHKTGYFSPALLSPQRLNPQIPGLYINIVYNPLTDKGEGNKIWCDPLTKNTFGYDPPKSKFLIENLPLWSAVTGYVDYCTKASKDESFKYNYRVLIQTPYTVPALYSDSETTKNRGYIPIGTDFAYGRMPGGVQQIPIRWRMRWYPMLFNQQPVLEDLFQSGPFAYQGDAKSATLVGKYAFKWLWGGNRIFQQVVRDPRSHQQDQSVGPSRQPRAVQVFDPKYQAPQWTFHAWDIRRGLFGRQAIKRVSAKPTPDELISTGPKRPRLEVPAFQEEQEKDLLFRQRKHKAWEDTTEEETEAPSEEEEENQELQLVRRLQQQRELGRGLRCLFQQLTRTQMGLHVDPQLLAPV

SEQ ID NO: 291 - protein, 744 aa, Torque teno virus 10
MAWGWWKRRRKWWWRRRWTRGRLRKRRARRAGRRPRRRRVRRRRAWRRGRRKRRTFRRRRRRKGRRHRTRLIIRQWQPEIVRKCLIIGYFPMIICGQGRWSENYSSHLEDRVVKQAFGGGHATTRWSLKVLYEENLRHLNFWTWTNRDLELARYLKVTWTFYRHQDVDFIIYFNRKSPMGGNIYTAPMMHPGALMLSKHKILVKSFKTKPKGKATVKVTIKPPTLLVDKWYFQKDICDMTLLNLNAVAADLRFPFCSPQTDNPCINFQVLSSVYNNFLSITDNRLTPVTDDGQAYYKAFLDAAFTKDRDFNAVNTFRTISNFSHPQLELPTKTTNTSQDQYFNTLDGYWGDPIYVHTQNIKPDQNLDKCKEILTNNMKNWHKKVKSENPSSLNHSCFAHNVGIFSSSFLSAGRLAPEVPGLYTDVIYNPYTDKGKGNMLWVDYCSKGDNLYKEGQSKCLLANLPLWMATNGYIDWVKKETDNWVINTQARVLMVCPYTYPKLYHEIQPLYGFVVYSYNFGEGKMPNGATYIPFKFRNKWYPTIYMQQAVLEDISRSGPFALKQQIPSATLTAKYKFKFLFGGNPTSEQVVRDPCTQPTFELPGASTQPPRIQVTDPKLLGPHYSFHSWDLRRGYYSTKSIKRMSEHEEPSEFIFPGPKKPRVDLGPIQQQERPSDSLQRESRPWETSEEESEAEVQQEETEEVPLRQQLLHNLREQQQLRKGLQCVFQQLIKTQQGVHIDPSLL

SEQ ID NO: 292 - protein, 219 aa, Torque teno virus
MAWSWWWRRRKRWWPRRRRRWRRFRTRRARRAVPRRRRRRRVRRRRWGRRGRRRRVFYKRRRRKTGRLYRKPKKKLVLTQWHPTTVRNCSIRGLVPLVLCGHTQGGRNFALRSDDYPKQGSPYGGSFSTTTWNLRVLFDEHQKHHNTWSYPNNQLDLGRYKGCTFCFYRGKKTDYIVKFQRRGPFKINKYSSPMAHPGMMMLDKMKILVPSFDTRPGGR

SEQ ID NO: 293 - protein, 219 aa, Torque teno virus; identical to SEQ ID NO: 292

SEQ ID NO: 294 - protein, 219 aa, Torque teno virus
MAWSWWWRRRKRWWPRRRRRWRRFRTRRARRAVPRRRRRRRVRRRRWGRRRRRRRVFYKRRRRKTGRLYRKPKKKLVLTQWHPTTVRNCSIRGLVPLVLCGHTQGGRNFALRSDDYPKQGSPYGGSFSTTTWNLRVLFDEHQKHHNTWSYPNNQLDLGRYKGCTFYFYRDKKTDYIVKFQRRGPFKINKYSSPMAHPGMMMLDKMKILVPSFDTRPGGR

SEQ ID NO: 295 - protein, 219 aa, Torque teno virus; identical to SEQ ID NO: 294

SEQ ID NO: 296 - protein, 469 aa, Torque teno virus
MYYGCIGINSTLTTKYENLFNKLYSKCCYFETFQTIAQLNPGFKAAKKTTNGSGSTAATLGDAVTELKNPNGTFYTGNNSTFGCCTYKPTKQIGSNANKWFWHQLTATDSDTLGQYGRASIQYMEYHTGIYSSIFLSPLRSNLELPTAYQDVTYNPLTDRGIGNRIWYQYSTKENTTFNETQCKCVLSDLPLWSMFYGYVDFIESELGISAEIHNFGIVCVQCPYTFPPMFDKSKPDKGYVFYDTLFGNGKMPDGSGHVPTYWQQRWWPRFSFQRQVMHDIILTGPFSYKDDSVMTGITAGYKFKFSWGGDMVSEQVIKNPERGDGRDSTYPDRQRRDSQVVDPRSMGPQWVFHTFDYRRGLFGKDAIKRVSEKPTDPDYFTTPYKKPRFFPPTAGEEKLQEEDSALQEKRSPLSSEEGQTRAQVLQQQVLQSELQQQQELGEQLRFLLREMFKTQAGIHMNPRAFQEL

SEQ ID NO: 297 - protein, 469 aa, Torque teno virus; identical to SEQ ID NO: 296

SEQ ID NO: 298 - protein, 469 aa, Torque teno virus
MYYDCIGINSTLTTKYENLFNKLYSKCCYFETFQTIAQLNPGFKAAKKTTNGSGSTAATLGDAVTELKNPNGTFYTGNNSTFGCCTYKPTKQIGSNANKWFWHQLTATDSDTLGQYGRASIQYMEYHTGIYSSIFLSPLRSNLEFPTAYQDVTYNPLTDRGIGNRIWYQYSTKENTTFNETQCKCVLSDLPLWSMFYGYVDFIESELGISAEIHNFGIVCVQCPYTFPPMFDKSKPDKGYVFYDTLFGNGKMPDGSGHVPTYWQQRWWPRFSFQRQVMHDIILTGPFSYKDDSVMTGITAGYKFKFSWGGDMVSEQVIKNSERGDGRDSTYPDRQRRDLQVVDPRSMGPQWVFHTFDYRRGLFGKDAIKRVSEKPTDPDYFTTPYKKPRFFPPTAGEEKLQEEDSALQEKRSPLSSEEGQTRAQVLQQQVLQSELQQQQELGEQLRFLLREMFKTQAGIHMNPRAFQEL

SEQ ID NO: 299 - protein, 469 aa, Torque teno virus; identical to SEQ ID NO: 298

SEQ ID NO: 300 - RNA, 76 nt, Artificial Sequence
  source: /note="Description of Artificial Sequence: Synthetic oligonucleotide"
gccauuuuaaguagcugacgucaaggauugacguaaagguuaaaggucauccucggcggaagcuacacaaaauggu

SEQ ID NO: 301 - RNA, 78 nt, Artificial Sequence
  source: /note="Description of Artificial Sequence: Synthetic oligonucleotide"
gcguacgucacaagucacguggaggggacccgcuguaacccggaaguaggccccgucacgugacuuaccacgugugua

SEQ ID NO: 302 - RNA, 77 nt, Artificial Sequence
  source: /note="Description of Artificial Sequence: Synthetic oligonucleotide"
gccauuuuaaguagcugacgucaaggauugacgugaagguuaaaggucauccucggcggaagcuacacaaaauggug

SEQ ID NO: 303 - RNA, 78 nt, Artificial Sequence
  source: /note="Description of Artificial Sequence: Synthetic oligonucleotide"
gcacacgucauaagucacgugguggggacccgcuguaacccggaaguaggccccgucacgugauuugucacgugugua

SEQ ID NO: 304 - RNA, 66 nt, Artificial Sequence
  source: /note="Description of Artificial Sequence: Synthetic oligonucleotide"
cuuccgggucauaggucacaccuacgucacaagucacguggggaggguuggcguauagcccggaag

SEQ ID NO: 305 - RNA, 68 nt, Artificial Sequence
  source: /note="Description of Artificial Sequence: Synthetic oligonucleotide"
gccggggggcugccgccccccccggggaaaggggggggccccccccggggggggguuugccccccggc

SEQ ID NO: 306 - RNA, 78 nt, Artificial Sequence
  source: /note="Description of Artificial Sequence: Synthetic oligonucleotide"
auacgucaucagucacgugggggaaggcgugccuaaacccggaagcauccucguccacgugacugugacguguguggc

SEQ ID NO: 307 - RNA, 73 nt, Artificial Sequence
  source: /note="Description of Artificial Sequence: Synthetic oligonucleotide"
cauuuuaaguaaggcggaagcagcucggcguacacaaaauggcggcggagcacuuccggcuugcccaaaaugg

SEQ ID NO: 308 - RNA, 71 nt, Artificial Sequence
  source: /note="Description of Artificial Sequence: Synthetic oligonucleotide"
gucacaagucacguggggaggguuggcguuuaacccggaagccaauccucuuacguggccugucacgugac

SEQ ID NO: 309 - RNA, 70 nt, Artificial Sequence
  source: /note="Description of Artificial Sequence: Synthetic oligonucleotide"
cgaccgcgucccgaaggcggguacccgaggugaguuuacacaccgagguuaagggccaauucgggcuugg

SEQ ID NO: 310 - RNA, 59 nt, Artificial Sequence
  source: /note="Description of Artificial Sequence: Synthetic oligonucleotide"
cgcgguaucguagccgacgcggaccccguuuucggggcccccgcggggcucucggcgcg

SEQ ID NO: 311 - RNA, 78 nt, Artificial Sequence
  source: /note="Description of Artificial Sequence: Synthetic oligonucleotide"
cgccauuuugugauacgcgcguccccucccggcuuccguacaacgucaggcggggcguggccguaucagaaaauggcg

SEQ ID NO: 312 - RNA, 77 nt, Artificial Sequence
  source: /note="Description of Artificial Sequence: Synthetic oligonucleotide"
gcuacgucauaagucacgugacugggcagguacuaaacccggaaguauccucggucacguggccugucacguaguug

SEQ ID NO: 313 - RNA, 80 nt, Artificial Sequence
  source: /note="Description of Artificial Sequence: Synthetic oligonucleotide"
ggcusugacgucaaagucacgugggraggguggcguuaaacccggaagucauccucgucacgugaccugacgucacagcc

SEQ ID NO: 314 - RNA, 66 nt, Artificial Sequence
  source: /note="Description of Artificial Sequence: Synthetic oligonucleotide"
gcccguccgcggcgagagcgcgagcgaagcgagcgaucgagcgucccgugggcgggugccgaaggu

SEQ ID NO: 315 - RNA, 80 nt, Artificial Sequence
  source: /note="Description of Artificial Sequence: Synthetic oligonucleotide"
gguugugacgucaaagucacguggggagggcggcguuaaacccggaagucauccucgucacgugaccugacgucacggcc

SEQ ID NO: 316 - RNA, 67 nt, Artificial Sequence
  source: /note="Description of Artificial Sequence: Synthetic oligonucleotide"
gcccguccgcggcgagagcgcgagcgaagcgagcgaucgagcgucccgugggcgggugccguaggug

SEQ ID NO: 317 - RNA, 67 nt, Artificial Sequence; identical to SEQ ID NO: 316
  source: /note="Description of Artificial Sequence: Synthetic oligonucleotide"

SEQ ID NO: 318 - RNA, 80 nt, Artificial Sequence
  source: /note="Description of Artificial Sequence: Synthetic oligonucleotide"
ggcugugacgucaaagucacguggggagggcggcguuaaacccggaagucauccucgucacgugaccugacgucacggcc

SEQ ID NO: 319 - RNA, 79 nt, Artificial Sequence
  source: /note="Description of Artificial Sequence: Synthetic oligonucleotide"
agaccacgugguaagucacgugggggcagcugcuguaaacccggaaguagcugacccgcgugacuggucacgugaccug

SEQ ID NO: 320 - RNA, 78 nt, Artificial Sequence
  source: /note="Description of Artificial Sequence: Synthetic oligonucleotide"
cgccauuuuauaauacgcgcguccccucccggcuuccguacuacgucaggcggggcguggccguauuagaaaauggug

SEQ ID NO: 321 - RNA, 72 nt, Artificial Sequence
  source: /note="Description of Artificial Sequence: Synthetic oligonucleotide"
uaaguaaggcggaaccaggcugucacccugugucaaaggucaagggacagccuuccggcuugcacaaaaugg

SEQ ID NO: 322 - RNA, 78 nt, Artificial Sequence
  source: /note="Description of Artificial Sequence: Synthetic oligonucleotide"
ugccuacgucauaagucacguggggacggcugcuguaaacacggaaguagcugacccgcgugacuugucacgugagca

SEQ ID NO: 323 - RNA, 72 nt, Artificial Sequence
  source: /note="Description of Artificial Sequence: Synthetic oligonucleotide"
uuguguaaggcggaacaggcugacaccccgugucaaaggucaggggucagccuccgcuuugcaccaaauggu

SEQ ID NO: 324 - RNA, 79 nt, Artificial Sequence
  source: /note="Description of Artificial Sequence: Synthetic oligonucleotide"
uaccuacgucauaagucacgugggaagagcugcugugaaccuggaaguagcugacccgcguggcuugucacgugagugc

SEQ ID NO: 325 - RNA, 75 nt, Artificial Sequence
  source: /note="Description of Artificial Sequence: Synthetic oligonucleotide"
uuuuccuggcccguccgcggcgagagcgcgagcgaagcgagcgaucgggcgucccgagggcgggugccggaggug

SEQ ID NO: 326 - RNA, 68 nt, Artificial Sequence
  source: /note="Description of Artificial Sequence: Synthetic oligonucleotide"
aaagugaguggggccagacuucgccauagggccuuuaacuuccgggugcgucugggggccgccauuuu

SEQ ID NO: 327 - RNA, 73 nt, Artificial Sequence
  source: /note="Description of Artificial Sequence: Synthetic oligonucleotide"
gugacguuacucucacgugaugggggcgugcucuaacccggaagcauccucgaccacgugacugugacgucac

SEQ ID NO: 328 - RNA, 75 nt, Artificial Sequence
  source: /note="Description of Artificial Sequence: Synthetic oligonucleotide"
agcgucuacuacguacacuuccugggguguguccugccacuguauauaaaccagaggggugacgaaugguagagu

SEQ ID NO: 329 - RNA, 73 nt, Artificial Sequence
  source: /note="Description of Artificial Sequence: Synthetic oligonucleotide"
gugacgucaaagucacguggugacggccauuuuaacccggaaguggcuguugucacgugacuugacgucacgg

SEQ ID NO: 330 - RNA, 62 nt, Artificial Sequence
  source: /note="Description of Artificial Sequence: Synthetic oligonucleotide"
gcuuuagacgccauuuuaggcccucgcgggcacccguaggcgcguuuuaaugacgucacggc

SEQ ID NO: 331 - RNA, 73 nt, Artificial Sequence
  source: /note="Description of Artificial Sequence: Synthetic oligonucleotide"
cacccguaggcgcguuuuaaugacgucacggcagccauuuugucgugacguuugagacacgugaugggggcgu

SEQ ID NO: 332 - RNA, 80 nt, Artificial Sequence
  source: /note="Description of Artificial Sequence: Synthetic oligonucleotide"
gucgugacguuugagacacgugaugggggcgugccuaaacccggaagcaucccuggucacgugacucugacgucacggcg

SEQ ID NO: 333 - RNA, 77 nt, Artificial Sequence
  source: /note="Description of Artificial Sequence: Synthetic oligonucleotide"
cgaaagugaguggggccagacuucgccauaaggccuuuaacuuccgggugcgugugggggccgccauuuuagcuucg

SEQ ID NO: 334 - RNA, 76 nt, Artificial Sequence
  source: /note="Description of Artificial Sequence: Synthetic oligonucleotide"
cugugacgucaaagucacguggggagggcggcguguaacccggaagucauccucgucacgugaccugacgucacgg

SEQ ID NO: 335 - RNA, 73 nt, Artificial Sequence
  source: /note="Description of Artificial Sequence: Synthetic oligonucleotide"
cuguccgccaucuugugacuuccuuccgcuuuuucaaaaaaaaagaggaaguaugacguagcggcgggggggc

SEQ ID NO: 336 - RNA, 67 nt, Artificial Sequence
  source: /note="Description of Artificial Sequence: Synthetic oligonucleotide"
gguagaguuuuuuccgcccguccgcagcgaggacgcgagcgcagcgagcggccgagcgacccguggg

SEQ ID NO: 337 - RNA, 80 nt, Artificial Sequence
  source: /note="Description of Artificial Sequence: Synthetic oligonucleotide"
gcugugacguuucagucacguggggagggaacgccuaaacccggaagcgucccuggucacgugauugugacgucacggcc

SEQ ID NO: 338 - RNA, 63 nt, Artificial Sequence
  source: /note="Description of Artificial Sequence: Synthetic oligonucleotide"
ccgccauuuugugacuuccuuccgcuuuuucaaaaaaaaagaggaagugugacguagcggcgg

SEQ ID NO: 339 - RNA, 78 nt, Artificial Sequence
  source: /note="Description of Artificial Sequence: Synthetic oligonucleotide"
gacugugacgucaaagucacguggggagggcggcguguaacccggaagucauccucgucacgugaccugacgucacgg

SEQ ID NO: 340 - RNA, 73 nt, Artificial Sequence
  source: /note="Description of Artificial Sequence: Synthetic oligonucleotide"
cuguccgccaucuugugacuuccuuccgcuuuuucaaaaaaaaagaggaaguaugacguggcggcgggggggc

SEQ ID NO: 341 - RNA, 80 nt, Artificial Sequence
  source: /note="Description of Artificial Sequence: Synthetic oligonucleotide"
gguugugacgucaaagucacguggggagggcggcguguaacccggaagucauccucgucacgugaccugacgucacggcc

SEQ ID NO: 342 - RNA, 65 nt, Artificial Sequence
  source: /note="Description of Artificial Sequence: Synthetic oligonucleotide"
cccgccaucuugugacuuccuuccgcuuuuucaaaaaaaaagaggaagugugacguagcggcggg

SEQ ID NO: 343 - RNA, 67 nt, Artificial Sequence; identical to SEQ ID NO: 316
  source: /note="Description of Artificial Sequence: Synthetic oligonucleotide"

SEQ ID NO: 344 - RNA, 78 nt, Artificial Sequence
  source: /note="Description of Artificial Sequence: Synthetic oligonucleotide"
gacugugacgucaaagucacguggggaggagggcguguaacccggaagucauccucgucacgugaccugacgucacgg

SEQ ID NO: 345 - RNA, 62 nt, Artificial Sequence
  source: /note="Description of Artificial Sequence: Synthetic oligonucleotide"
ucgcgucuuagugacgucacggcagccaucuugguccugacgucacugucacguggggaggg

SEQ ID NO: 346 - RNA, 76 nt, Artificial Sequence
  source: /note="Description of Artificial Sequence: Synthetic oligonucleotide"
ugacgucacugucacguggggagggaacacgugaacccggaagugucccuggucacgugacaugacgucacggccg

SEQ ID NO: 347 - RNA, 78 nt, Artificial Sequence
  source: /note="Description of Artificial Sequence: Synthetic oligonucleotide"
cgccauuuuaaguaagcauggcgggcggugaugucaaauguuaaaggucacagccggucaugcuugcacaaaauggcg

SEQ ID NO: 348 - RNA, 78 nt, Artificial Sequence
  source: /note="Description of Artificial Sequence: Synthetic oligonucleotide"
cgccauuuuaaguaagcauggcgggcggugacgugcaaugucaaaggucacagccugucaugcuugcacaaaauggcg

SEQ ID NO: 349 - RNA, 72 nt, Artificial Sequence
  source: /note="Description of Artificial Sequence: Synthetic oligonucleotide"
ccaucuuaaguaguugaggcggacgguggcgucgguucaaaggucaccaucagccacaccuacucaaaaugg

SEQ ID NO: 350 - RNA, 67 nt, Artificial Sequence
  source: /note="Description of Artificial Sequence: Synthetic oligonucleotide"
gccugucaugcuugcacaaaauggcggacuuccgcuuccgggucgccgccauauuuggucacgugac

SEQ ID NO: 351 - RNA, 76 nt, Artificial Sequence; identical to SEQ ID NO: 300
  source: /note="Description of Artificial Sequence: Synthetic oligonucleotide"

SEQ ID NO: 352 - RNA, 76 nt, Artificial Sequence; identical to SEQ ID NO: 300
  source: /note="Description of Artificial Sequence: Synthetic oligonucleotide"

SEQ ID NO: 353 - RNA, 78 nt, Artificial Sequence
  source: /note="Description of Artificial Sequence: Synthetic oligonucleotide"
gcauacgucacaagucacgugggggggacccgcuguaacccggaaguaggccccgucacgugacuuaccacgugugua

SEQ ID NO: 354 - RNA, 76 nt, Artificial Sequence
  source: /note="Description of Artificial Sequence: Synthetic oligonucleotide"
gccauuuuaaguagcugacgucaaggauugacgugaagguuaaaggucauccucggcggaagcuacacaaaauggu

SEQ ID NO: 355 - RNA, 78 nt, Artificial Sequence; identical to SEQ ID NO: 303
  source: /note="Description of Artificial Sequence: Synthetic oligonucleotide"

SEQ ID NO: 356 - RNA, 76 nt, Artificial Sequence
  source: /note="Description of Artificial Sequence: Synthetic oligonucleotide"
gccauuuuaagucagcucuggggaggcgugacuuccaguucaaaggucauccucaccauaacuggcacaaaauggc

SEQ ID NO: 357 - RNA, 76 nt, Artificial Sequence; identical to SEQ ID NO: 300
  source: /note="Description of Artificial Sequence: Synthetic oligonucleotide"

SEQ ID NO: 358 - RNA, 78 nt, Artificial Sequence
  source: /note="Description of Artificial Sequence: Synthetic oligonucleotide"
gcauacgucacaagucacguggaggggacacgcuguaacccggaaguaggccccgucacgugacuuaccacgugugua

SEQ ID NO: 359 - RNA, 79 nt, Artificial Sequence
  source: /note="Description of Artificial Sequence: Synthetic oligonucleotide"
gcgccauguuaaguggcugucgccgaggauugacgucacaguucaaaggucauccucgacgguaaccgcaaacauggcg

SEQ ID NO: 360 - RNA, 76 nt, Artificial Sequence
  source: /note="Description of Artificial Sequence: Synthetic oligonucleotide"
caugcgucauaagucacaugacagggguccacuuaaacacggaaguaggccccgacaugugacucgucacgugugu

SEQ ID NO: 361 - RNA, 73 nt, Artificial Sequence
  source: /note="Description of Artificial Sequence: Synthetic oligonucleotide"
uggcagcacuuccgaauggcugaguuuuccacgcccguccgcggagagggagccacggaggugaucccgaacg

SEQ ID NO: 362 - RNA, 78 nt, Artificial Sequence
  source: /note="Description of Artificial Sequence: Synthetic oligonucleotide"
gccauuuuaagucagcgcuggggaggcaugacuguaaguucaaaggucauccucaccggaacugacacaaaauggccg

SEQ ID NO: 363 - RNA, 80 nt, Artificial Sequence
  source: /note="Description of Artificial Sequence: Synthetic oligonucleotide"
gccaucuuaaguggcugucgccgaggauugacgucacaguucaaaggucauccucggcgguaaccgcaaagauggcgguc

SEQ ID NO: 364 - RNA, 76 nt, Artificial Sequence
  source: /note="Description of Artificial Sequence: Synthetic oligonucleotide"
auacgucauaagucacaugucuagggguccacuuaaacacggaaguaggccccgacaugugacucgucacgugugu

SEQ ID NO: 365 - RNA, 77 nt, Artificial Sequence
  source: /note="Description of Artificial Sequence: Synthetic oligonucleotide"
ccauuuuaaguaaggcggaagcagcugucccuguaacaaaauggcggcgacagccuuccgcuuugcacaaaauggag

SEQ ID NO: 366 - RNA, 80 nt, Artificial Sequence
  source: /note="Description of Artificial Sequence: Synthetic oligonucleotide"
gccaucuuaaguggcugucgcugaggauugacgucacaguucaaaggucauccucggcgguaaccgcaaagauggcgguc

SEQ ID NO: 367 - RNA, 76 nt, Artificial Sequence
  source: /note="Description of Artificial Sequence: Synthetic oligonucleotide"
cauacgucauaagucacaugacaggaguccacuuaaacacggaaguaggccccgacaugugacucgucacgugugu

SEQ ID NO: 368 - RNA, 80 nt, Artificial Sequence
  source: /note="Description of Artificial Sequence: Synthetic oligonucleotide"
cgccaucuuaaguggcugucgccgaggauuggcgucacaguucaaaggucauccucggcgguaaccgcaaagauggcggu

SEQ ID NO: 369 - RNA, 76 nt, Artificial Sequence
  source: /note="Description of Artificial Sequence: Synthetic oligonucleotide"
cauacgucauaagucacaugacagggguccacuuaaacacggaaguaggccccgacaugugacucgucacgugugu

SEQ ID NO: 370 - RNA, 78 nt, Artificial Sequence
  source: /note="Description of Artificial Sequence: Synthetic oligonucleotide"
gcauacgucacaagucacgugggggggacccgcuguaacccggaaguaggccccgucacgugacuuaccacguggugu

SEQ ID NO: 371 - RNA, 77 nt, Artificial Sequence
  source: /note="Description of Artificial Sequence: Synthetic oligonucleotide"
ccgccauuuuaggcuguugccgggcguuugacuuccguguuaaaggucaaacacccagcgacaccaaaaaauggccg

SEQ ID NO: 372 - RNA, 77 nt, Artificial Sequence
  source: /note="Description of Artificial Sequence: Synthetic oligonucleotide"
cuacgucauaagucacgugacagggaggggcgacaaacccggaagucauccucgcccacgugacuuaccacguggug

SEQ ID NO: 373 - RNA, 77 nt, Artificial Sequence
  source: /note="Description of Artificial Sequence: Synthetic oligonucleotide"
gccauuuuaaguaggugacguccaggacugacguaaaguucaaaggucauccucggcggaaccuauacaaaauggcg

SEQ ID NO: 374 - RNA, 76 nt, Artificial Sequence
  source: /note="Description of Artificial Sequence: Synthetic oligonucleotide"
cuacgucauaagucacguggggacggcuguacuuaaacacggaaguaggccccgucacgugauuuaccacguggug

SEQ ID NO: 375 - RNA, 73 nt, Artificial Sequence
  source: /note="Description of Artificial Sequence: Synthetic oligonucleotide"
gccauuuuaaguaaggcggaagagcucuagcuauacaaaauggcggcggagcacuuccgcuuugcccaaaaug

SEQ ID NO: 376 - RNA, 77 nt, Artificial Sequence
  source: /note="Description of Artificial Sequence: Synthetic oligonucleotide"
gccauuuuaaguagcugacgucaaggauugacguagagguuaaaggucauccucggcggaagcuacacaaaauggug

SEQ ID NO: 377 - RNA, 78 nt, Artificial Sequence; identical to SEQ ID NO: 353
  source: /note="Description of Artificial Sequence: Synthetic oligonucleotide"

SEQ ID NO: 378 - RNA, 80 nt, Artificial Sequence
  source: /note="Description of Artificial Sequence: Synthetic oligonucleotide"
ggcgccauuuuaaguaagcauggcgggcggcgacgucacaugucaaaggucaccgcacuuccgugcuugcacaaaauggc

SEQ ID NO: 379 - RNA, 73 nt, Artificial Sequence
  source: /note="Description of Artificial Sequence: Synthetic oligonucleotide"
ugcuacgucaucgagacacguggugccagcagcuguaaacccggaagucgcugacacacgugucuugucacgu

SEQ ID NO: 380 - RNA, 78 nt, Artificial Sequence
  source: /note="Description of Artificial Sequence: Synthetic oligonucleotide"
gccauuuuaaguaagcaccgccuagggaugacguauaaguucaaaggucauccucagccggaacuuacacaaaauggu

SEQ ID NO: 381 - RNA, 72 nt, Artificial Sequence
  source: /note="Description of Artificial Sequence: Synthetic oligonucleotide"
acgucauaugucacguggggaggcccugcugcgcaaacgcggaaguaggccccgucacgugucauaccacgu

SEQ ID NO: 382 - RNA, 77 nt, Artificial Sequence
  source: /note="Description of Artificial Sequence: Synthetic oligonucleotide"
ccauuuuaaguaaggcggaagcagcuccacuuucucacaaaauggcggcggggcacuuccggcuugcccaaaauggc

SEQ ID NO: 383 - RNA, 72 nt, Artificial Sequence
  source: /note="Description of Artificial Sequence: Synthetic oligonucleotide"
ccauuuuaaguaaggcggaaguuucuccacuauacaaaauggcggcggagcacuuccggcuugcccaaaaug

SEQ ID NO: 384 - RNA, 72 nt, Artificial Sequence
  source: /note="Description of Artificial Sequence: Synthetic oligonucleotide"
ccaucuuaaguaguugaggcggacgguggcgugaguucaaaggucaccaucagccacaccuacucaaaaugg

SEQ ID NO: 385 - RNA, 76 nt, Artificial Sequence
  source: /note="Description of Artificial Sequence: Synthetic oligonucleotide"
cgccaucuuaaguaguugaggcggacgguggcgugaguucaaaggucaccaucagccacaccuacucaaaauggug

SEQ ID NO: 386 - RNA, 73 nt, Artificial Sequence
  source: /note="Description of Artificial Sequence: Synthetic oligonucleotide"
uuucggaccuucggcgucgggggggucgggggcuuuacuaaacagacuccgagaugccauuggacacugaggg

SEQ ID NO: 387 - RNA, 76 nt, Artificial Sequence
  source: /note="Description of Artificial Sequence: Synthetic oligonucleotide"
ccauuuuaaguaggugccguccagcacugcuguuccggguuaaagggcauccucggcggaaccuauacaaaauggc

SEQ ID NO: 388 - RNA, 73 nt, Artificial Sequence
  source: /note="Description of Artificial Sequence: Synthetic oligonucleotide"
cuacgucaucgaugacguggggaggcguacuaugaaacgcggaaguaggccccgcuacgucaucaucacgugg

SEQ ID NO: 389 - RNA, 73 nt, Artificial Sequence
  source: /note="Description of Artificial Sequence: Synthetic oligonucleotide"
ccauuuuaaguaaggcggaagagcugcucuauauacaaaauggcggaggagcacuuccggcuugcccaaaaug

SEQ ID NO: 390 - RNA, 75 nt, Artificial Sequence
  source: /note="Description of Artificial Sequence: Synthetic oligonucleotide"
ugccuacguaacaagucacguggggaggguuggcguauaacccggaagucaauccucccacguggccugucacgu

SEQ ID NO: 391 - RNA, 72 nt, Artificial Sequence
  source: /note="Description of Artificial Sequence: Synthetic oligonucleotide"
uaaguaaggcggaaccaggcugucaccccgugucaaaggucaggggucagccuuccgcuuuacacaaaaugg

SEQ ID NO: 392 - RNA, 72 nt, Artificial Sequence; identical to SEQ ID NO: 391
  source: /note="Description of Artificial Sequence: Synthetic oligonucleotide"

SEQ ID NO: 393 - RNA, 80 nt, Artificial Sequence
  source: /note="Description of Artificial Sequence: Synthetic oligonucleotide"
gcagccauuuuaagucagcuucggggagggucacgcaaaguucaaaggucauccucaccggaacugguacaaaauggccg

SEQ ID NO: 394 - RNA, 74 nt, Artificial Sequence
  source: /note="Description of Artificial Sequence: Synthetic oligonucleotide"
ugcuacgucauaagugacguagcuggugucugcuguaaacacggaaguaggccccgccacgucacuugucacgu

SEQ ID NO: 395 - RNA, 23 nt, Artificial Sequence
  source: /note="Description of Artificial Sequence: Synthetic oligonucleotide"
aguagcugacgucaaggauugac

SEQ ID NO: 396 - RNA, 22 nt, Artificial Sequence
  source: /note="Description of Artificial Sequence: Synthetic oligonucleotide"
caagucacguggaggggacccg

SEQ ID NO: 397 - RNA, 25 nt, Artificial Sequence
  source: /note="Description of Artificial Sequence: Synthetic oligonucleotide"
aaguagcugacgucaaggauugacg

SEQ ID NO: 398 - RNA, 23 nt, Artificial Sequence
  source: /note="Description of Artificial Sequence: Synthetic oligonucleotide"
auaagucacgugguggggacccg

SEQ ID NO: 399 - RNA, 26 nt, Artificial Sequence
  source: /note="Description of Artificial Sequence: Synthetic oligonucleotide"
uggggaggguuggcguauagcccgga

SEQ ID NO: 400 - RNA, 24 nt, Artificial Sequence
  source: /note="Description of Artificial Sequence: Synthetic oligonucleotide"
ccccccccggggggggguuugccc

SEQ ID NO: 401 - RNA, 25 nt, Artificial Sequence
  source: /note="Description of Artificial Sequence: Synthetic oligonucleotide"
aucagucacgugggggaaggcgugc

SEQ ID NO: 402 - RNA, 22 nt, Artificial Sequence
  source: /note="Description of Artificial Sequence: Synthetic oligonucleotide"
aaguaaggcggaagcagcucgg

SEQ ID NO: 403 - RNA, 21 nt, Artificial Sequence
  source: /note="Description of Artificial Sequence: Synthetic oligonucleotide"
agucacguggggaggguuggc

SEQ ID NO: 404 - RNA, 22 nt, Artificial Sequence
  source: /note="Description of Artificial Sequence: Synthetic oligonucleotide"
cccgaaggcggguacccgaggu

SEQ ID NO: 405 - RNA, 23 nt, Artificial Sequence
  source: /note="Description of Artificial Sequence: Synthetic oligonucleotide"
uaucguagccgacgcggaccccg

SEQ ID NO: 406 - RNA, 26 nt, Artificial Sequence
  source: /note="Description of Artificial Sequence: Synthetic oligonucleotide"
auuuugugauacgcgcguccccuccc

SEQ ID NO: 407 - RNA, 21 nt, Artificial Sequence
  source: /note="Description of Artificial Sequence: Synthetic oligonucleotide"
aagucacgugacugggcaggu

SEQ ID NO: 408 - RNA, 26 nt, Artificial Sequence
  source: /note="Description of Artificial Sequence: Synthetic oligonucleotide"
ugacgucaaagucacgugggragggu

SEQ ID NO: 409 - RNA, 23 nt, Artificial Sequence
  source: /note="Description of Artificial Sequence: Synthetic oligonucleotide"
gaucgagcgucccgugggcgggu

SEQ ID NO: 410 - RNA, 28 nt, Artificial Sequence
  source: /note="Description of Artificial Sequence: Synthetic oligonucleotide"
ugacgucaaagucacguggggagggcgg

SEQ ID NO: 411 - RNA, 23 nt, Artificial Sequence
  source: /note="Description of Artificial Sequence: Synthetic oligonucleotide"
gaucgagcgucccgugggcgggu

SEQ ID NO: 412 - RNA, 23 nt, Artificial Sequence
  source: /note="Description of Artificial Sequence: Synthetic oligonucleotide"
gaucgagcgucccgugggcgggu

SEQ ID NO: 413 - RNA, 28 nt, Artificial Sequence
  source: /note="Description of Artificial Sequence: Synthetic oligonucleotide"
ugacgucaaagucacguggggagggcgg

SEQ ID NO: 414 - RNA, 26 nt, Artificial Sequence
  source: /note="Description of Artificial Sequence: Synthetic oligonucleotide"
acgugguaagucacgugggggcagcu

SEQ ID NO: 415 - RNA, 25 nt, Artificial Sequence
  source: /note="Description of Artificial Sequence: Synthetic oligonucleotide"
auuuuauaauacgcgcguccccucc

SEQ ID NO: 416 - RNA, 22 nt, Artificial Sequence
  source: /note="Description of Artificial Sequence: Synthetic oligonucleotide"
aagggacagccuuccggcuugc

SEQ ID NO: 417 - RNA, 25 nt, Artificial Sequence
  source: /note="Description of Artificial Sequence: Synthetic oligonucleotide"
cauaagucacguggggacggcugcu

SEQ ID NO: 418 - RNA, 24 nt, Artificial Sequence
  source: /note="Description of Artificial Sequence: Synthetic oligonucleotide"
uaaggcggaacaggcugacacccc

SEQ ID NO: 419 - RNA, 28 nt, Artificial Sequence
  source: /note="Description of Artificial Sequence: Synthetic oligonucleotide"
uacgucauaagucacgugggaagagcug

SEQ ID NO: 420 - RNA, 22 nt, Artificial Sequence
  source: /note="Description of Artificial Sequence: Synthetic oligonucleotide"
ucgggcgucccgagggcgggug

SEQ ID NO: 421 - RNA, 25 nt, Artificial Sequence
  source: /note="Description of Artificial Sequence: Synthetic oligonucleotide"
aaagugaguggggccagacuucgcc

SEQ ID NO: 422 - RNA, 22 nt, Artificial Sequence
  source: /note="Description of Artificial Sequence: Synthetic oligonucleotide"
cucucacgugaugggggcgugc

SEQ ID NO: 423 - RNA, 28 nt, Artificial Sequence
  source: /note="Description of Artificial Sequence: Synthetic oligonucleotide"
ucuacuacguacacuuccuggggugugu

SEQ ID NO: 424 - RNA, 22 nt, Artificial Sequence
  source: /note="Description of Artificial Sequence: Synthetic oligonucleotide"
uggcuguugucacgugacuuga

SEQ ID NO: 425 - RNA, 24 nt, Artificial Sequence
  source: /note="Description of Artificial Sequence: Synthetic oligonucleotide"
agacgccauuuuaggcccucgcgg

SEQ ID NO: 426 - RNA, 25 nt, Artificial Sequence
  source: /note="Description of Artificial Sequence: Synthetic oligonucleotide"
ugucgugacguuugagacacgugau

SEQ ID NO: 427 - RNA, 30 nt, Artificial Sequence
  source: /note="Description of Artificial Sequence: Synthetic oligonucleotide"
ugacguuugagacacgugaugggggcgugc

SEQ ID NO: 428 - RNA, 22 nt, Artificial Sequence
  source: /note="Description of Artificial Sequence: Synthetic oligonucleotide"
agugaguggggccagacuucgc

SEQ ID NO: 429 - RNA, 30 nt, Artificial Sequence
  source: /note="Description of Artificial Sequence: Synthetic oligonucleotide"
ugugacgucaaagucacguggggagggcgg

SEQ ID NO: 430 - RNA, 27 nt, Artificial Sequence
  source: /note="Description of Artificial Sequence: Synthetic oligonucleotide"
aaaagaggaaguaugacguagcggcgg

SEQ ID NO: 431 - RNA, 21 nt, Artificial Sequence
  source: /note="Description of Artificial Sequence: Synthetic oligonucleotide"
agcgagcggccgagcgacccg

SEQ ID NO: 432 - RNA, 24 nt, Artificial Sequence
  source: /note="Description of Artificial Sequence: Synthetic oligonucleotide"
uucagucacguggggagggaacgc

SEQ ID NO: 433 - RNA, 24 nt, Artificial Sequence
  source: /note="Description of Artificial Sequence: Synthetic oligonucleotide"
aaaagaggaagugugacguagcgg

SEQ ID NO: 434 - RNA, 30 nt, Artificial Sequence; identical to SEQ ID NO: 429
  source: /note="Description of Artificial Sequence: Synthetic oligonucleotide"

SEQ ID NO: 435 - RNA, 24 nt, Artificial Sequence
  source: /note="Description of Artificial Sequence: Synthetic oligonucleotide"
aaaagaggaaguaugacguggcgg

SEQ ID NO: 436 - RNA, 28 nt, Artificial Sequence
  source: /note="Description of Artificial Sequence: Synthetic oligonucleotide"
ugacgucaaagucacguggggagggcgg

SEQ ID NO: 437 - RNA, 29 nt, Artificial Sequence
  source: /note="Description of Artificial Sequence: Synthetic oligonucleotide"
aaaaaagaggaagugugacguagcggcgg

SEQ ID NO: 438 - RNA, 23 nt, Artificial Sequence
  source: /note="Description of Artificial Sequence: Synthetic oligonucleotide"
gaucgagcgucccgugggcgggu

SEQ ID NO: 439 - RNA, 30 nt, Artificial Sequence
  source: /note="Description of Artificial Sequence: Synthetic oligonucleotide"
ugugacgucaaagucacguggggaggaggg

SEQ ID NO: 440 - RNA, 21 nt, Artificial Sequence
  source: /note="Description of Artificial Sequence: Synthetic oligonucleotide"
uugguccugacgucacuguca

SEQ ID NO: 441 - RNA, 27 nt, Artificial Sequence
  source: /note="Description of Artificial Sequence: Synthetic oligonucleotide"
cgucacugucacguggggagggaacac

SEQ ID NO: 442 - RNA, 24 nt, Artificial Sequence
  source: /note="Description of Artificial Sequence: Synthetic oligonucleotide"
uaaguaagcauggcgggcggugau

SEQ ID NO: 443 - RNA, 22 nt, Artificial Sequence
  source: /note="Description of Artificial Sequence: Synthetic oligonucleotide"
aaguaagcauggcgggcgguga

SEQ ID NO: 444 - RNA, 24 nt, Artificial Sequence
  source: /note="Description of Artificial Sequence: Synthetic oligonucleotide"
uaaguaguugaggcggacgguggc

SEQ ID NO: 445 - RNA, 29 nt, Artificial Sequence
  source: /note="Description of Artificial Sequence: Synthetic oligonucleotide"
ucaugcuugcacaaaauggcggacuuccg

SEQ ID NO: 446 - RNA, 23 nt, Artificial Sequence
  source: /note="Description of Artificial Sequence: Synthetic oligonucleotide"
aguagcugacgucaaggauugac

SEQ ID NO: 447 - RNA, 23 nt, Artificial Sequence
  source: /note="Description of Artificial Sequence: Synthetic oligonucleotide"
aguagcugacgucaaggauugac

SEQ ID NO: 448 - RNA, 23 nt, Artificial Sequence
  source: /note="Description of Artificial Sequence: Synthetic oligonucleotide"
acaagucacgugggggggacccg

SEQ ID NO: 449 - RNA, 25 nt, Artificial Sequence
  source: /note="Description of Artificial Sequence: Synthetic oligonucleotide"
aaguagcugacgucaaggauugacg

SEQ ID NO: 450 - RNA, 23 nt, Artificial Sequence
  source: /note="Description of Artificial Sequence: Synthetic oligonucleotide"
auaagucacgugguggggacccg

SEQ ID NO: 451 - RNA, 26 nt, Artificial Sequence
  source: /note="Description of Artificial Sequence: Synthetic oligonucleotide"
aagucagcucuggggaggcgugacuu

SEQ ID NO: 452 - RNA, 23 nt, Artificial Sequence
  source: /note="Description of Artificial Sequence: Synthetic oligonucleotide"
aguagcugacgucaaggauugac

SEQ ID NO: 453 - RNA, 22 nt, Artificial Sequence
  source: /note="Description of Artificial Sequence: Synthetic oligonucleotide"
caagucacguggaggggacacg

SEQ ID NO: 454 - RNA, 27 nt, Artificial Sequence
  source: /note="Description of Artificial Sequence: Synthetic oligonucleotide"
uguuaaguggcugucgccgaggauuga

SEQ ID NO: 455 - RNA, 22 nt, Artificial Sequence
  source: /note="Description of Artificial Sequence: Synthetic oligonucleotide"
uaagucacaugacaggggucca

SEQ ID NO: 456 - RNA, 22 nt, Artificial Sequence
  source: /note="Description of Artificial Sequence: Synthetic oligonucleotide"
cggagagggagccacggaggug

SEQ ID NO: 457 - RNA, 23 nt, Artificial Sequence
  source: /note="Description of Artificial Sequence: Synthetic oligonucleotide"
aagucagcgcuggggaggcauga

SEQ ID NO: 458 - RNA, 28 nt, Artificial Sequence
  source: /note="Description of Artificial Sequence: Synthetic oligonucleotide"
ucuuaaguggcugucgccgaggauugac

SEQ ID NO: 459 - RNA, 24 nt, Artificial Sequence
  source: /note="Description of Artificial Sequence: Synthetic oligonucleotide"
aagucacaugucuagggguccacu

SEQ ID NO: 460 - RNA, 23 nt, Artificial Sequence
  source: /note="Description of Artificial Sequence: Synthetic oligonucleotide"
aaguaaggcggaagcagcugucc

SEQ ID NO: 461 - RNA, 29 nt, Artificial Sequence
  source: /note="Description of Artificial Sequence: Synthetic oligonucleotide"
aucuuaaguggcugucgcugaggauugac

SEQ ID NO: 462 - RNA, 24 nt, Artificial Sequence
  source: /note="Description of Artificial Sequence: Synthetic oligonucleotide"
uaagucacaugacaggaguccacu

SEQ ID NO: 463 - RNA, 22 nt, Artificial Sequence
  source: /note="Description of Artificial Sequence: Synthetic oligonucleotide"
aaguggcugucgccgaggauug

SEQ ID NO: 464 - RNA, 22 nt, Artificial Sequence
  source: /note="Description of Artificial Sequence: Synthetic oligonucleotide"
uaagucacaugacaggggucca

SEQ ID NO: 465 - RNA, 23 nt, Artificial Sequence
  source: /note="Description of Artificial Sequence: Synthetic oligonucleotide"
acaagucacgugggggggacccg

SEQ ID NO: 466 - RNA, 28 nt, Artificial Sequence
  source: /note="Description of Artificial Sequence: Synthetic oligonucleotide"
auuuuaggcuguugccgggcguuugacu

SEQ ID NO: 467 - RNA, 23 nt, Artificial Sequence
  source: /note="Description of Artificial Sequence: Synthetic oligonucleotide"
auaagucacgugacagggagggg

SEQ ID NO: 468 - RNA, 21 nt, Artificial Sequence
  source: /note="Description of Artificial Sequence: Synthetic oligonucleotide"
aaguaggugacguccaggacu

SEQ ID NO: 469 - RNA, 24 nt, Artificial Sequence
  source: /note="Description of Artificial Sequence: Synthetic oligonucleotide"
cauaagucacguggggacggcugu

SEQ ID NO: 470 - RNA, 26 nt, Artificial Sequence
  source: /note="Description of Artificial Sequence: Synthetic oligonucleotide"
uaaguaaggcggaagagcucuagcua

SEQ ID NO: 471 - RNA, 23 nt, Artificial Sequence
  source: /note="Description of Artificial Sequence: Synthetic oligonucleotide"
aguagcugacgucaaggauugac

SEQ ID NO: 472 - RNA, 23 nt, Artificial Sequence
  source: /note="Description of Artificial Sequence: Synthetic oligonucleotide"
acaagucacgugggggggacccg

SEQ ID NO: 473 - RNA, 24 nt, Artificial Sequence
  source: /note="Description of Artificial Sequence: Synthetic oligonucleotide"
uaaguaagcauggcgggcggcgac

SEQ ID NO: 474 - RNA, 25 nt, Artificial Sequence
  source: /note="Description of Artificial Sequence: Synthetic oligonucleotide"
aucgagacacguggugccagcagcu

SEQ ID NO: 475 - RNA, 30 nt, Artificial Sequence
  source: /note="Description of Artificial Sequence: Synthetic oligonucleotide"
ucauccucagccggaacuuacacaaaaugg

SEQ ID NO: 476 - RNA, 26 nt, Artificial Sequence
  source: /note="Description of Artificial Sequence: Synthetic oligonucleotide"
auaugucacguggggaggcccugcug

SEQ ID NO: 477 - RNA, 26 nt, Artificial Sequence
  source: /note="Description of Artificial Sequence: Synthetic oligonucleotide"
aaguaaggcggaagcagcuccacuuu

SEQ ID NO: 478 - RNA, 24 nt, Artificial Sequence
  source: /note="Description of Artificial Sequence: Synthetic oligonucleotide"
aaguaaggcggaaguuucuccacu

SEQ ID NO: 479 - RNA, 24 nt, Artificial Sequence
  source: /note="Description of Artificial Sequence: Synthetic oligonucleotide"
uaaguaguugaggcggacgguggc

SEQ ID NO: 480 - RNA, 23 nt, Artificial Sequence
  source: /note="Description of Artificial Sequence: Synthetic oligonucleotide"
uaaguaguugaggcggacggugg

SEQ ID NO: 481 - RNA, 27 nt, Artificial Sequence
  source: /note="Description of Artificial Sequence: Synthetic oligonucleotide"
gaccuucggcgucgggggggucggggg

SEQ ID NO: 482 - RNA, 19 nt, Artificial Sequence
  source: /note="Description of Artificial Sequence: Synthetic oligonucleotide"
auccucggcggaaccuaua

SEQ ID NO: 483 - RNA, 26 nt, Artificial Sequence
  source: /note="Description of Artificial Sequence: Synthetic oligonucleotide"
aucgaugacguggggaggcguacuau

SEQ ID NO: 484 - RNA, 24 nt, Artificial Sequence
  source: /note="Description of Artificial Sequence: Synthetic oligonucleotide"
uggcggaggagcacuuccggcuug

SEQ ID NO: 485 - RNA, 25 nt, Artificial Sequence
  source: /note="Description of Artificial Sequence: Synthetic oligonucleotide"
aacaagucacguggggaggguuggc

SEQ ID NO: 486 - RNA, 21 nt, Artificial Sequence
  source: /note="Description of Artificial Sequence: Synthetic oligonucleotide"
aggggucagccuuccgcuuua

SEQ ID NO: 487 - RNA, 21 nt, Artificial Sequence
  source: /note="Description of Artificial Sequence: Synthetic oligonucleotide"
aggggucagccuuccgcuuua

SEQ ID NO: 488 - RNA, 24 nt, Artificial Sequence
  source: /note="Description of Artificial Sequence: Synthetic oligonucleotide"
uaagucagcuucggggagggucac

SEQ ID NO: 489 - RNA, 27 nt, Artificial Sequence
  source: /note="Description of Artificial Sequence: Synthetic oligonucleotide"
ucauaagugacguagcuggugucugcu

SEQ ID NO: 490 - RNA, 23 nt, Artificial Sequence
  source: /note="Description of Artificial Sequence: Synthetic oligonucleotide"
cauccucggcggaagcuacacaa

SEQ ID NO: 491 - RNA, 23 nt, Artificial Sequence
  source: /note="Description of Artificial Sequence: Synthetic oligonucleotide"
ggccccgucacgugacuuaccac

SEQ ID NO: 492 - RNA, 24 nt, Artificial Sequence
  source: /note="Description of Artificial Sequence: Synthetic oligonucleotide"
ucauccucggcggaagcuacacaa

SEQ ID NO: 493 - RNA, 23 nt, Artificial Sequence
  source: /note="Description of Artificial Sequence: Synthetic oligonucleotide"
ggccccgucacgugauuugucac

SEQ ID NO: 494 - RNA, 27 nt, Artificial Sequence
  source: /note="Description of Artificial Sequence: Synthetic oligonucleotide"
ccgggucauaggucacaccuacgucac

SEQ ID NO: 495 - RNA, 28 nt, Artificial Sequence
  source: /note="Description of Artificial Sequence: Synthetic oligonucleotide"
ggcugccgccccccccggggaaaggggg

SEQ ID NO: 496 - RNA, 22 nt, Artificial Sequence
  source: /note="Description of Artificial Sequence: Synthetic oligonucleotide"
auccucguccacgugacuguga

SEQ ID NO: 497 - RNA, 21 nt, Artificial Sequence
  source: /note="Description of Artificial Sequence: Synthetic oligonucleotide"
gagcacuuccggcuugcccaa

SEQ ID NO: 498 - RNA, 20 nt, Artificial Sequence
  source: /note="Description of Artificial Sequence: Synthetic oligonucleotide"
caauccucuuacguggccug

SEQ ID NO: 499 - RNA, 24 nt, Artificial Sequence
  source: /note="Description of Artificial Sequence: Synthetic oligonucleotide"
cgagguuaagggccaauucgggcu

SEQ ID NO: 500 - RNA, 23 nt, Artificial Sequence
  source: /note="Description of Artificial Sequence: Synthetic oligonucleotide"
gggcccccgcggggcucucggcg

SEQ ID NO: 501 - RNA, 27 nt, Artificial Sequence
  source: /note="Description of Artificial Sequence: Synthetic oligonucleotide"
gcggggcguggccguaucagaaaaugg

SEQ ID NO: 502 - RNA, 19 nt, Artificial Sequence
  source: /note="Description of Artificial Sequence: Synthetic oligonucleotide"
ccucggucacguggccugu

SEQ ID NO: 503 - RNA, 26 nt, Artificial Sequence
  source: /note="Description of Artificial Sequence: Synthetic oligonucleotide"
ccucgucacgugaccugacgucacag

SEQ ID NO: 504 - RNA, 25 nt, Artificial Sequence
  source: /note="Description of Artificial Sequence: Synthetic oligonucleotide"
ccguccgcggcgagagcgcgagcga

SEQ ID NO: 505 - RNA, 27 nt, Artificial Sequence
  source: /note="Description of Artificial Sequence: Synthetic oligonucleotide"
auccucgucacgugaccugacgucacg

SEQ ID NO: 506 - RNA, 25 nt, Artificial Sequence
  source: /note="Description of Artificial Sequence: Synthetic oligonucleotide"
ccguccgcggcgagagcgcgagcga

SEQ ID NO: 507 - RNA, 25 nt, Artificial Sequence
  source: /note="Description of Artificial Sequence: Synthetic oligonucleotide"
ccguccgcggcgagagcgcgagcga

SEQ ID NO: 508 - RNA, 27 nt, Artificial Sequence
  source: /note="Description of Artificial Sequence: Synthetic oligonucleotide"
auccucgucacgugaccugacgucacg

SEQ ID NO: 509 - RNA, 25 nt, Artificial Sequence
  source: /note="Description of Artificial Sequence: Synthetic oligonucleotide"
cugacccgcgugacuggucacguga

SEQ ID NO: 510 - RNA, 26 nt, Artificial Sequence
  source: /note="Description of Artificial Sequence: Synthetic oligonucleotide"
cggggcguggccguauuagaaaaugg

SEQ ID NO: 511 - RNA, 29 nt, Artificial Sequence
  source: /note="Description of Artificial Sequence: Synthetic oligonucleotide"
aguaaggcggaaccaggcugucacccugu

SEQ ID NO: 512 - RNA, 24 nt, Artificial Sequence
  source: /note="Description of Artificial Sequence: Synthetic oligonucleotide"
uagcugacccgcgugacuugucac

SEQ ID NO: 513 - RNA, 19 nt, Artificial Sequence
  source: /note="Description of Artificial Sequence: Synthetic oligonucleotide"
ggucagccuccgcuuugca

SEQ ID NO: 514 - RNA, 28 nt, Artificial Sequence
  source: /note="Description of Artificial Sequence: Synthetic oligonucleotide"
gcugacccgcguggcuugucacgugagu

SEQ ID NO: 515 - RNA, 25 nt, Artificial Sequence
  source: /note="Description of Artificial Sequence: Synthetic oligonucleotide"
ggcccguccgcggcgagagcgcgag

SEQ ID NO: 516 - RNA, 27 nt, Artificial Sequence
  source: /note="Description of Artificial Sequence: Synthetic oligonucleotide"
uccgggugcgucugggggccgccauuu

SEQ ID NO: 517 - RNA, 21 nt, Artificial Sequence
  source: /note="Description of Artificial Sequence: Synthetic oligonucleotide"
auccucgaccacgugacugug

SEQ ID NO: 518 - RNA, 30 nt, Artificial Sequence
  source: /note="Description of Artificial Sequence: Synthetic oligonucleotide"
auaaaccagaggggugacgaaugguagagu

SEQ ID NO: 519 - RNA, 23 nt, Artificial Sequence
  source: /note="Description of Artificial Sequence: Synthetic oligonucleotide"
caaagucacguggugacggccau

SEQ ID NO: 520 - RNA, 26 nt, Artificial Sequence
  source: /note="Description of Artificial Sequence: Synthetic oligonucleotide"
guaggcgcguuuuaaugacgucacgg

SEQ ID NO: 521 - RNA, 28 nt, Artificial Sequence
  source: /note="Description of Artificial Sequence: Synthetic oligonucleotide"
uaggcgcguuuuaaugacgucacggcag

SEQ ID NO: 522 - RNA, 29 nt, Artificial Sequence
  source: /note="Description of Artificial Sequence: Synthetic oligonucleotide"
aucccuggucacgugacucugacgucacg

SEQ ID NO: 523 - RNA, 26 nt, Artificial Sequence
  source: /note="Description of Artificial Sequence: Synthetic oligonucleotide"
gcgugugggggccgccauuuuagcuu

SEQ ID NO: 524 - RNA, 29 nt, Artificial Sequence
  source: /note="Description of Artificial Sequence: Synthetic oligonucleotide"
ucauccucgucacgugaccugacgucacg

SEQ ID NO: 525 - RNA, 29 nt, Artificial Sequence
  source: /note="Description of Artificial Sequence: Synthetic oligonucleotide"
cgccaucuugugacuuccuuccgcuuuuu

SEQ ID NO: 526 - RNA, 22 nt, Artificial Sequence
  source: /note="Description of Artificial Sequence: Synthetic oligonucleotide"
uagaguuuuuuccgcccguccg

SEQ ID NO: 527 - RNA, 23 nt, Artificial Sequence
  source: /note="Description of Artificial Sequence: Synthetic oligonucleotide"
gucccuggucacgugauugugac

SEQ ID NO: 528 - RNA, 26 nt, Artificial Sequence
  source: /note="Description of Artificial Sequence: Synthetic oligonucleotide"
cauuuugugacuuccuuccgcuuuuu

SEQ ID NO: 529 - RNA, 29 nt, Artificial Sequence
  source: /note="Description of Artificial Sequence: Synthetic oligonucleotide"
ucauccucgucacgugaccugacgucacg

SEQ ID NO: 530 - RNA, 30 nt, Artificial Sequence
  source: /note="Description of Artificial Sequence: Synthetic oligonucleotide"
ccgccaucuugugacuuccuuccgcuuuuu

SEQ ID NO: 531 - RNA, 27 nt, Artificial Sequence
  source: /note="Description of Artificial Sequence: Synthetic oligonucleotide"
auccucgucacgugaccugacgucacg

SEQ ID NO: 532 - RNA, 30 nt, Artificial Sequence
  source: /note="Description of Artificial Sequence: Synthetic oligonucleotide"
cgccaucuugugacuuccuuccgcuuuuuc

SEQ ID NO: 533 - RNA, 25 nt, Artificial Sequence
  source: /note="Description of Artificial Sequence: Synthetic oligonucleotide"
ccguccgcggcgagagcgcgagcga

SEQ ID NO: 534 - RNA, 29 nt, Artificial Sequence
  source: /note="Description of Artificial Sequence: Synthetic oligonucleotide"
ucauccucgucacgugaccugacgucacg

SEQ ID NO: 535 - RNA, 23 nt, Artificial Sequence
  source: /note="Description of Artificial Sequence: Synthetic oligonucleotide"
cuuagugacgucacggcagccau

SEQ ID NO: 536 - RNA, 25 nt, Artificial Sequence
  source: /note="Description of Artificial Sequence: Synthetic oligonucleotide"
gucccuggucacgugacaugacguc

SEQ ID NO: 537 - RNA, 24 nt, Artificial Sequence
  source: /note="Description of Artificial Sequence: Synthetic oligonucleotide"
cacagccggucaugcuugcacaaa

SEQ ID NO: 538 - RNA, 22 nt, Artificial Sequence
  source: /note="Description of Artificial Sequence: Synthetic oligonucleotide"
acagccugucaugcuugcacaa

SEQ ID NO: 539 - RNA, 24 nt, Artificial Sequence
  source: /note="Description of Artificial Sequence: Synthetic oligonucleotide"
caccaucagccacaccuacucaaa

SEQ ID NO: 540 - RNA, 28 nt, Artificial Sequence
  source: /note="Description of Artificial Sequence: Synthetic oligonucleotide"
cgggucgccgccauauuuggucacguga

SEQ ID NO: 541 - RNA, 23 nt, Artificial Sequence
  source: /note="Description of Artificial Sequence: Synthetic oligonucleotide"
cauccucggcggaagcuacacaa

SEQ ID NO: 542 - RNA, 23 nt, Artificial Sequence
  source: /note="Description of Artificial Sequence: Synthetic oligonucleotide"
cauccucggcggaagcuacacaa

SEQ ID NO: 543 - RNA, 23 nt, Artificial Sequence
  source: /note="Description of Artificial Sequence: Synthetic oligonucleotide"
ggccccgucacgugacuuaccac

SEQ ID NO: 544 - RNA, 24 nt, Artificial Sequence
  source: /note="Description of Artificial Sequence: Synthetic oligonucleotide"
ucauccucggcggaagcuacacaa

SEQ ID NO: 545 - RNA, 23 nt, Artificial Sequence
  source: /note="Description of Artificial Sequence: Synthetic oligonucleotide"
ggccccgucacgugauuugucac

SEQ ID NO: 546 - RNA, 25 nt, Artificial Sequence
  source: /note="Description of Artificial Sequence: Synthetic oligonucleotide"
gucauccucaccauaacuggcacaa

SEQ ID NO: 547 - RNA, 23 nt, Artificial Sequence
  source: /note="Description of Artificial Sequence: Synthetic oligonucleotide"
cauccucggcggaagcuacacaa

SEQ ID NO: 548 - RNA, 23 nt, Artificial Sequence
  source: /note="Description of Artificial Sequence: Synthetic oligonucleotide"
ggccccgucacgugacuuaccac

SEQ ID NO: 549 - RNA, 25 nt, Artificial Sequence
  source: /note="Description of Artificial Sequence: Synthetic oligonucleotide"
auccucgacgguaaccgcaaacaug

SEQ ID NO: 550 - RNA, 21 nt, Artificial Sequence
  source: /note="Description of Artificial Sequence: Synthetic oligonucleotide"
ggccccgacaugugacucguc

SEQ ID NO: 551 - RNA, 27 nt, Artificial Sequence
  source: /note="Description of Artificial Sequence: Synthetic oligonucleotide"
agcacuuccgaauggcugaguuuucca

SEQ ID NO: 552 - RNA, 22 nt, Artificial Sequence
  source: /note="Description of Artificial Sequence: Synthetic oligonucleotide"
auccucaccggaacugacacaa

SEQ ID NO: 553 - RNA, 26 nt, Artificial Sequence
  source: /note="Description of Artificial Sequence: Synthetic oligonucleotide"
cauccucggcgguaaccgcaaagaug

SEQ ID NO: 554 - RNA, 22 nt, Artificial Sequence
  source: /note="Description of Artificial Sequence: Synthetic oligonucleotide"
uaggccccgacaugugacucgu

SEQ ID NO: 555 - RNA, 21 nt, Artificial Sequence
  source: /note="Description of Artificial Sequence: Synthetic oligonucleotide"
acagccuuccgcuuugcacaa

SEQ ID NO: 556 - RNA, 27 nt, Artificial Sequence
  source: /note="Description of Artificial Sequence: Synthetic oligonucleotide"
cauccucggcgguaaccgcaaagaugg

SEQ ID NO: 557 - RNA, 23 nt, Artificial Sequence
  source: /note="Description of Artificial Sequence: Synthetic oligonucleotide"
uaggccccgacaugugacucguc

SEQ ID NO: 558 - RNA, 20 nt, Artificial Sequence
  source: /note="Description of Artificial Sequence: Synthetic oligonucleotide"
uccucggcgguaaccgcaaa

SEQ ID NO: 559 - RNA, 21 nt, Artificial Sequence
  source: /note="Description of Artificial Sequence: Synthetic oligonucleotide"
ggccccgacaugugacucguc

SEQ ID NO: 560 - RNA, 23 nt, Artificial Sequence
  source: /note="Description of Artificial Sequence: Synthetic oligonucleotide"
ggccccgucacgugacuuaccac

SEQ ID NO: 561 - RNA, 28 nt, Artificial Sequence
  source: /note="Description of Artificial Sequence: Synthetic oligonucleotide"
ucaaacacccagcgacaccaaaaaaugg

SEQ ID NO: 562 - RNA, 22 nt, Artificial Sequence
  source: /note="Description of Artificial Sequence: Synthetic oligonucleotide"
ccucgcccacgugacuuaccac

SEQ ID NO: 563 - RNA, 20 nt, Artificial Sequence
  source: /note="Description of Artificial Sequence: Synthetic oligonucleotide"
ccucggcggaaccuauacaa

SEQ ID NO: 564 - RNA, 22 nt, Artificial Sequence
  source: /note="Description of Artificial Sequence: Synthetic oligonucleotide"
gccccgucacgugauuuaccac

SEQ ID NO: 565 - RNA, 28 nt, Artificial Sequence
  source: /note="Description of Artificial Sequence: Synthetic oligonucleotide"
gcggcggagcacuuccgcuuugcccaaa

SEQ ID NO: 566 - RNA, 23 nt, Artificial Sequence
  source: /note="Description of Artificial Sequence: Synthetic oligonucleotide"
cauccucggcggaagcuacacaa

SEQ ID NO: 567 - RNA, 23 nt, Artificial Sequence
  source: /note="Description of Artificial Sequence: Synthetic oligonucleotide"
ggccccgucacgugacuuaccac

SEQ ID NO: 568 - RNA, 25 nt, Artificial Sequence
  source: /note="Description of Artificial Sequence: Synthetic oligonucleotide"
caccgcacuuccgugcuugcacaaa

SEQ ID NO: 569 - RNA, 24 nt, Artificial Sequence
  source: /note="Description of Artificial Sequence: Synthetic oligonucleotide"
ucgcugacacacgugucuugucac

SEQ ID NO: 570 - RNA, 30 nt, Artificial Sequence
  source: /note="Description of Artificial Sequence: Synthetic oligonucleotide"
cauuuuaaguaagcaccgccuagggaugac

SEQ ID NO: 571 - RNA, 26 nt, Artificial Sequence
  source: /note="Description of Artificial Sequence: Synthetic oligonucleotide"
guaggccccgucacgugucauaccac

SEQ ID NO: 572 - RNA, 25 nt, Artificial Sequence
  source: /note="Description of Artificial Sequence: Synthetic oligonucleotide"
ggcggggcacuuccggcuugcccaa

SEQ ID NO: 573 - RNA, 26 nt, Artificial Sequence
  source: /note="Description of Artificial Sequence: Synthetic oligonucleotide"
cggcggagcacuuccggcuugcccaa

SEQ ID NO: 574 - RNA, 24 nt, Artificial Sequence
  source: /note="Description of Artificial Sequence: Synthetic oligonucleotide"
caccaucagccacaccuacucaaa

SEQ ID NO: 575 - RNA, 23 nt, Artificial Sequence
  source: /note="Description of Artificial Sequence: Synthetic oligonucleotide"
accaucagccacaccuacucaaa

SEQ ID NO: 576 - RNA, 28 nt, Artificial Sequence
  source: /note="Description of Artificial Sequence: Synthetic oligonucleotide"
gacuccgagaugccauuggacacugagg

SEQ ID NO: 577 - RNA, 18 nt, Artificial Sequence
  source: /note="Description of Artificial Sequence: Synthetic oligonucleotide"
aguaggugccguccagca

SEQ ID NO: 578 - RNA, 27 nt, Artificial Sequence
  source: /note="Description of Artificial Sequence: Synthetic oligonucleotide"
aaguaggccccgcuacgucaucaucac

SEQ ID NO: 579 - RNA, 23 nt, Artificial Sequence
  source: /note="Description of Artificial Sequence: Synthetic oligonucleotide"
aaggcggaagagcugcucuauau

SEQ ID NO: 580 - RNA, 24 nt, Artificial Sequence
  source: /note="Description of Artificial Sequence: Synthetic oligonucleotide"
caauccucccacguggccugucac

SEQ ID NO: 581 - RNA, 26 nt, Artificial Sequence
  source: /note="Description of Artificial Sequence: Synthetic oligonucleotide"
aaggcggaaccaggcugucaccccgu

SEQ ID NO: 582 - RNA, 26 nt, Artificial Sequence
  source: /note="Description of Artificial Sequence: Synthetic oligonucleotide"
aaggcggaaccaggcugucaccccgu

SEQ ID NO: 583 - RNA, 24 nt, Artificial Sequence
  source: /note="Description of Artificial Sequence: Synthetic oligonucleotide"
cauccucaccggaacugguacaaa

SEQ ID NO: 584 - RNA, 26 nt, Artificial Sequence
  source: /note="Description of Artificial Sequence: Synthetic oligonucleotide"
uaggccccgccacgucacuugucacg

SEQ ID NO: 585 - DNA, 609 bp, Torque teno virus
atggctgagttttccacgcccgtccgcagcggtgaagccacggagggagatcaccgcgtcccgagggcgggtgccgaaggtgagtttacacaccgaagtcaaggggcaattcgggctcgggactggccgggctatgggcaaggctctgaaaaaagcatgtttattggcaggcattacagaaagaaaagggcgctgtcactgtgtgctgtgcgaacaacaaagaaggcttgcaaactactaatagtaatgtggaccccacctcgcaatgatcaacagtaccttaactggcaatggtactcaagtgtacttagcccccacgctgctatgtgcgggtgtcccgacgctgtcgctcattttaatcatcttgcttctgtgcttcgtgccccgcaaaacccaccccctcccggtccccagcgaaacctgcccctccgacggctgccggctctcccggctgcgccagaggcgcccggagatagagcaccatggcctatggctggtggcgccgaaggagaagacggtggcgcaggtggagacccagaccatggaggccccgctggaggacccgaagacgcagacctgctagacgccgtggccaccgcagaaacgtaa

SEQ ID NO: 586 - DNA, 609 bp, Torque teno virus
atggctgggttttccacgcccgtccgcagcggtgaagccacggagggagctcagcgcgtcccgagggcgggtgccgaaggtgagtttacacaccgcagtcaaggggcaattcgggctcgggactggccgggctatgggcaagactctgaaaaatgcatttttatcggcaggcattacagaaagaaaaaggcactgtcactgtgtgcagtgcgagcaacacagaaggcttgcaaacttctaaaagttatgtggagccctccccgcaacgatgaacattaccttaagggacaatggtactcaagtatacttagctctcactctgctttctgtggctgccccgatgctgtcgctcacttcaatcatcttgctactgtacttcgtgctccggaaaacccgggaccccccgggggacatcgaccttctccgctccgggtcctacccgctctcccggctgctcccgaggcgcccggtgatcgagcgccatggcctatgggttgtggaggagacggcgaaggaggtggaagaggtggagacgcagacggtggagacgccgctggaggacccgccgacgcagacctgctggacgccgtagacgccgcagaacagtaa

SEQ ID NO: 587 - DNA, 609 bp, Torque teno virus
atggctgagttttccacgcccgtccgcagcggtgaagccacggagggagattaccgcgtcccgagggcgggtgccgaaggtgagtttacacaccgaagtcaaggggcaattcgggctcgggactggccgggctatgggcaaggctctgaaaaaagcatgtttattggcaggcattacagaaagaaaagggcgctgtcactgtgtgctgtgcgaacaacaaagaaggcttgcaaactactaatagtaatgtggaccccacctcgcaatgatcaacagtaccttaactggcaatggtactcaagtgtacttaacccccacgctgctatgttcgggtgtcccgacgctgtcgctcattttaatcatcttgcttctgtgcttcgtgccccgcaaaacccaccccctcccggtccccagcgaaacctgcccctccgacgggtgccggctctcccggctgcgccagaggcgcccggagatagagcaccatggcctatggcttgtggcaccgaaggagaagacggtggcgcaggtggaaacgcacaccatggaagcgccgctggaggacccgaagacgcagacctgctagacgccgtggccgccgcagaaacgtaa

SEQ ID NO: 588 - DNA, 453 bp, Torque teno virus
atgtttattggcaggcattacagaaagaaaagggcgctgtcactgtgtgctgtgcgaacaacaaagaaggcttgcaaactactaatagtaatgtggaccccacctcgcaatgatcaacagtaccttaactggcaatggtactcaagtgtacttagctcccacgctgctatgtgcgggtgtcccgacgctgtcgctcattttaatcatcttgcttctgtgcttcgtgccccgcaaaacccaccccctcccggtccccagcgaaacctgcccctccgacggctgccggctctcccggctgcgccagaggcgcccggagatagagcaccatggcctatggctggtggcgccgaaggagaagacggtggcgcaggtggagacgcagaccatggaggcgccgctggaggacccgaagacgcagacctgctagacgccgtggccgccgcagaaacgtaa

SEQ ID NO: 589 - DNA, 453 bp, Torque teno virus
atgtttattggcaggcattacagaaagaaaagggcgctgtcactgtgtgctgtgcgaacaacaaagaaggcttgcaaactactaatactaatgtggaccccacctcgcaatgaccaacagtaccttaactggcaatggtactcaagtatacttagctcccacgctgctatgtgcgggtgtcccgacgctgtcgctcattttaatcatcttgcgtctgtgcttcgtgccccgcaaaacccaccccctcccggtccccagcgaaacctgcccctccgacggctgccggctctcccggctgcgccagaggcgcccggagatagagcaccatggcctatggctggtggcgccgaaggagaagacggtggcgcaggtggagacgcagaccatggaggcgccgctggaggacccgaagacgcagacctgctagacgccgtggccgccgcagaaacgtaa

SEQ ID NO: 590 - DNA, 453 bp, Torque teno virus
atgtttattggcaggcattacagaaagaaaagggcgctgtcactgtgtgctgtgcgaacaacaaagaaggcttgcaaactactaatactaatgtggaccccacctcgcaatgaccaacagtaccttaactggcaatggtactcaagtatacttagctcccacgctgctatgtgcgggtgtcccgacgctgtcgctcattttaatcatcttgcttctgtgcttcgtgccccgcaaaacccaccccctcccggtccccagcgaaacctgcccctccgacggctgccggctctcccggctgcgccagaggcgcccggagatagagcgccatggcctatggctggtggcgccgaaggagaagacggtggcgcaggtggagacgcagaccatggaggcgccgctggaggacccgaagacgcagacctgctagacgccgtggccgccgcagaaacgtaa

SEQ ID NO: 591 - DNA, 387 bp, Torque teno virus
atgccgtggagaccgccggtacataacgttccaggtcgcgaaaatcaatggtttgcagcgttttttcactcgcatgcttctttctgcggctgtggtgaccctgttgggcatattaacagcattgctcctcgctttcctaacgccggtccaccgagaccacctccagggctagagcagcagaaccccgagggcccgacgggtcccggaggtccccccgccatcttgccagctctgccggccccggcagaccctgaaccgccgccacggcttggtggtggggcagatggaggcgccgctggaggcctcgctatcgcagacgcacctggagggtacgaagaagacgacctagacgaacttttcgccgccgccgccgaggacgatatgtga

SEQ ID NO: 592 - DNA, 387 bp, Torque teno virus
atgccgtggagaccgccggcacataacgttccgggtagggaaaatcaatggttcgcagctgtgtttcactcgcatgcttcttggtgcggctgtggtgacgttgttgggcatcttaataccattgctactcgctttcctaacgccggtcccccgagaccacctccagggctagaccagcagaaccccgagggcccggcgggtcccggaggtccccccgccatcttgcctgctctgccggccccggcagaccctgaaccgccgccacggcgtggtggtggggcagatggaggcgtcgatggaggcctcgctatcgcaaacgcacctggagattacggagacgacgacctagacgaacttttcgccgccgccgccgaagacaatatgtga

SEQ ID NO: 593 - DNA, 387 bp, Torque teno virus
atgccgtggaaaccgccgcgacataacgttccgggtagggaaaaccaatggtttgcagcagtgtttcactcgcatgcttcttggtgcggctgtgctgacgttgttggccatcttaatagcattgctactcgctttcctaacatcggtcccccgagaccacctccagggctagaccagcagaaccccgagggcccggcgggtcccggaggtccccccgccatcttgcctgctctgccggccccggcaaaccctgaaccgccgccacggcgtggtggtggggcagatggaggcgccgctggaggcctcgctatcgcagacgcacctggagggtacgcagaagacgacctagacgaacttttcgccgccgccgccgaggacgatatgtga

SEQ ID NO: 594 - DNA, 450 bp, Torque teno virus
atgtttcctggtaggatccacagaaagaaaaggaaagtgctattgtccccactgcaccctgcaccgaaaactcgccgggttatgagctggtctcgtccaatacacgatgccccagccattgagcgtaactggtgggaatccacagctcgatcccacgcatgttgctgtggctgcggtaattttgttaatcatattaatgtactggctaatcggtatggctttactggctccgcgcacacgccgggtggtccccggccgaggcccccgacagtgagctctggtcccagtacttcctaccgacaccccgagaccggctttaccatggcatggggatactggtggagaaggcgcttctgcgaccgaggagacgctggaagaaggtggcggcgccgccgagactacaacccagaagatctcgacgctctgttcgacgccctcgacgaagagtaa

SEQ ID NO: 595 - DNA, 348 bp, Torque teno virus
atgagctttgtagaacccttactaaccagcacccacagagagatagcatactaccatggctgtgttcagatgcacaaagccttctgtgggtgtgacaactttcttacccacctgcaacgcataacaacatacatctctgctaaccaacacactccacccagcacaccctcaaacaccctccgtagagcccgggccctgcccgcggctccggagccagctccatggcgtggacctggtggtggcagaggaggcgccgaaggtggccgtggagaaggagaaggtggagaagactacgcacaagaagacctagacgccttgttcgacgccgtcgcaagagatacagagtaa

SEQ ID NO: 596 - DNA, 465 bp, Torque teno virus
atgcacttttctcgaataaacagaaagaaaaagaaagtgctactgctttgcgtgccagcagctaagaaaaaaccaactgctatgagcttctggagacctccggtgcacaatgtcacggggatccagcgcctgtggtacgagtcctttcaccgtggccatgctgctttttgtggttgtggggatcctatacttcacattactacacttgctgagacatatggccatccaacaggcccgagaccttctgggtcatcgggagtagaccccggccccaatatccgtcgagccaggcctgccccggccgctccggagccctcacaggttgattccagaccggccctgccatggcatggggatggtggaagcgacggcggcgctggtggttccggaagcggtggacccgtggcagacttcgcagacgatggcctagaccagctcgtcggcgccctagacgacgaagagtaa

SEQ ID NO: 597 - DNA, 453 bp, Torque teno virus
atgcacttttctaggatacaaagaaagaaaaggctattgctactgcagacactgccagcttcaaagaaaactaggcaacttctgagaggtatgtggagcccacccacagacgatgaacgtgtccgtgagcgtaaatggctcctctcagtttttcagtctcactgtgctttctgtggctgcaatgatcctatcggtcacctttgtcgcttggctactctgtctaaccgcccggagagcccggggccctccggaggaccccgtactcctcagatccggcacctacccgctctcccggctgctccccaagagcccggtgatcgagcaccatggcctatggctggtgggcccggagacggagacgctggcgccgctggaagcgcaggccctggagacgccgatggaggacccgcagacgcagacctcgtcgccgctatagacgccgcagacatgtaa

SEQ ID NO: 598 - DNA, 471 bp, Torque teno virus
atgcactttcgcagagtctcagcgaaaaggaaactgctactgcttcctctgcaccctgcatcgcagacacctgccatgagcttcagggcgccctctcttaatgccggtcaacgagagcagctatggttcgagtccatcgtccgatcccatgacagttattgcgggtgtggtgatactgtcgctcattttaataacattgctactcgctttaactatctgcctgttacctcctcgcctctggatccttcctcgggcccgccgcgaggccgtccagcgctccgcgcactcccggctctgccagcggcaccctccaccccctctactagccgaccatggcgtggtggggcagatggagaaggtggccgcggcgccggtggaggagatggcggcgccgccgtagaaggagactaccaacaagaagaactcgacgagctgttcgcggccttggaagacgaccaagaaagacggtaa

SEQ ID NO: 599 - DNA, 444 bp, Torque teno virus; identical to SEQ ID NO: 102

SEQ ID NO: 600 - DNA, 441 bp, Torque teno virus
atgtttcttggtaaaatttacagacagaaaaggaaagtgccactgtacggcctgccagctccaaagaaaaaaccacctactgctatgagccactggagcagacccgtccaccatgcaacggggatcgagcacctctggtaccagtctgttattaacagccattctgctagctgcggttgtggcgatcctgtacgccactttacttatcttgctgagaggtatggctttgccccaacttcccgggccccgccggtagccccaacgcccaccatccgtagagccaggcccgcgcctgccgctccggagccccgtgccctaccatggcatggggatggtggagacgaaggcgcaagtggtggtggagacgccggttcgcccgaagcagacttcgcagacgacggattagacgccctcgtcgccgcactcgacgaagaacagtaa

SEQ ID NO: 601 - DNA, 453 bp, Torque teno virus
atgtttctcggcaggccttacagaaagaagaggcaagtgccactgcctggcgtgcaccatccaccgcacccacggcctagcatgagccaccactggcgggagcccatcgacaatgtccccaaccgggagaggcactggctcgggtccgtcctccgaggccaccgagctttttgtggttgtcgggatcctgtgcttcattttactaatctggttgcacgttacaatcttcagggcggtggtccctcagcgggtagtcttagggatccgccgccactgaggagggcgctgccgccaccgccgtccccccgaccgccatgtcctggtggggatggcgccgccgatggtggtggaagccacggaggcgatggagacgcaggagggcgcgccgcccgagacgactaccgcgacgacgatatagaagacctactcgccgctatcgaggcagacgagtaa

SEQ ID NO: 602 - DNA, 426 bp, Torque teno virus
atgcgattttctcgaatttatcgcagaaagaagaggctactgccactgctactggtgccaacagaaccgaaagaacaatttgtgatgagctggcgctgtcccttagaaaatgcctataagagggaaattaacttcctcagagggtgccaaatgcttcacacttgtttttgtggttgtgatgattttattaatcatattattcgcctacaaaatcttcacgggaatttacaccaacccaccggcccgtccacacctccagtaggccgtagagctctggccctgccggcagctccggaaccatggcgtggagatggtggtgggcccgaaggcgaccgaaccgccgatggacccgcagacgctggaggagactacgcacccggagacctagacgacctgttcgccgccgccgccgccgaccaagagtaa

SEQ ID NO: 603 - DNA, 492 bp, Torque teno virus
atgggcaacgctcttagggtattcattcttaaaatgtttatcggcagggcctaccgccacaagaaaaggaaagtgctactgtccgcactgcgagctccacaggcgtctcggagggctatgagttggagaccccctgtacacgatgcgcccggcatcgagcgcaattggtacgaggcctgtttcagagcccacgctggaacttgtggctgtggcaattttattatgcacattaatcttctggctgggcgttatggttttactccggtatcagcaccaccaggtggtcctcctccgggcaccccgcagataaggagagccagacctagtcccgccgcgcccgaacagccccaggccctaccatggcatggggatggtggagacggtggcgccggtggcccaccagacgctggaggagacgccgtcgccggcgccccgtacggagaacaagagctcgccgacctgctcgacgctatagaagacgacgaacagtaa

SEQ ID NO: 604 - DNA, 1665 bp, Torque teno virus
atggcacacccgggcatgatgatgctaagcaaaatgaaaatactagtacccagttctgacaccagaccggggggcagacgcagagtaaaagttaaaataagacccccggcccttttagaagacaagtggtacactcagcaagatctagcgcccgttaatcttgtgtcacttgtggtttctgcgactagcttcatacatccgtttagccaaccacaaacgaacaacatttgcacaacttttcaggtgttgaaagacatgtactatgactgcataggagttagttccactttagacgacaaatataaaaaattatttcaaaaattatacactaaatgctgctactttgaaacatttcaaacaatagcccagctaaaccccggctttaaatctgctaaaaaaactacaactggctccggtaaggaagctgccacactaggcgacgcagttacacaattaaaaaaccaacacggtagtttttatactggaaacaatagtacttttggctgctgtacatataaccccactgaagaaataggtaaagcagcaaatgagtggttctggaaccaattaactgcaacagagtcagacacactaggacagtacggacgtgcctcaattaagtactttgaatatcacacaggactatacagttccatatttttaagtccactaaggagcaacctagaattttctacagcataccaggatgtaacatacaatccactgacagacctaggcataggcaacagaatctggtaccaatacagtaccaagccagacactacatttaacgaaacacagtgcaaatgtgtactaactgacctgcccctgtggtccctgttttatggatacgtagactttatagagtcagagctaggcataagcgcagagatacacaactttggcatagtttgcgttcagtgcccatacacctttccacccatgttcgacaagtctaagccagacaagggctacgtattttatgacaccctttttggtaacggaaagatgccagacggttccggacacgtacctacctactggcagcagagatggtggccaagatttagcttccagagacaagtaatgcatgacattattctgactggaccttttagttacaaagatgactctgtaatgactggactaacagcaggctacaagtttaaattcacatggggcggtgatatgatctccgaacaggtcattaaaaaccccgacagaggtgacggacgcgaatcctcctatcccgatagacagcgccgcgacctacaagttgttgaccctcgctccatggggccccaatgggtattccacacctttgactacaggaggggactatttggaaaggacgctattaaacgagtgtcagaaaaaccgacagatcctgactactttacaacaccttacaaaaaaccgaggtttttccccccaacagcaggagaagaaagactgcaagaagaaaactacactttacaggagaaaagagacccgttctcgtcagaagaggggccgcagaggacgcaagtcctccagcagcaggtcctccagtcggagctccagcagcagcaggagctcggggaccagctcagattcctcctcagggaaatgttcaaaacccaagcgggtatacacatgaacccccgcgcatttcaagagctgtaa

SEQ ID NO: 605 - DNA, 342 bp, Torque teno virus
atgagctggtgtactccagttgaaaatgcctataagagagagatccactttctcaggggctgtcaactgcttcacactagcttttgtggttgcgatgattttattaatcatattattcgcctacaaaatcttcacggcaacctacaccagcccacgggaccgtccacacctccagtgacccgtagagctctggccttgccggctgctccggagtcatggcgttccggtggtggtggtggagacgccgcccgcagcgacgatggacccggcgccgatggaggagactacgaacccgccgacctagacgcactgtacgacgccgtcgccgcagaccaagagtaa

SEQ ID NO: 606 - DNA, 348 bp, Torque teno virus
atgagctttgtagaaccgttactaagcagcacccaccgagagatagcattctaccatggctgtgttcaaatgcacaaggccttctgtggctgtgacaactttcttacccacctgcagcgcataacaacatacatctctgctaatcaacacactccacccagcacaccctcaaacaccctccgtagagcccgggccctgcccgcggctccggagccagctccatggcgtggacctggtggtggcagaggaggcgccgaaggtggccgtggagaaggagaaggtggagaagactacgcaccagaagacctagacgacttgttcgccgccgtcgcaagagatacagagtaa

SEQ ID NO: 607 - DNA, 405 bp, Torque teno virus
atgagtctgtggcgacccccggtccacaatgcccccggcagagagagactttggtttcaggcctgttacgaatctcacagtgctttttgtggctgtggtagctttattcttcatcttactagcttggctgcacgttttaattttcaggccgggccaccgcctcccgggggtccccgggcggagaccccgccgattctgagggcgctgccggcaccccagccgcgccgccaccgccagacggagaaccccgggtctgagccatggcctggagatggtggtggagacggcgctggaagccaagaaggcggccagcgtggaccaagtaccgcagacgcaggtggagacgacttcgaccccgcagacctagaagacttgctcgcggccgtcgaagaagacgaacagtaa

SEQ ID NO: 608 - DNA, 390 bp, Torque teno virus
atgaatctctggcgaccccctctgagaaatatcccccacagggagagatgttggcttgaggcctgtctcagagcccacgattctttttgtggctgtcctagtcctattgttcatttttctagtctggttgcacgttttaatctacaaggaggcccgccgccagaggatgactccccacagggcgcgccagtcctgagggccctgccggcaccgagcccccacaggcacacccgcacggagaacccctccggtgagccatggcctactcctactggtggcgccgccggaggtggccgtggagaggccgatggaggcgctggaggcgccgcagacgaataccgcgccgaagacctagacgacctgttcgccgctatcgaaggagaccagtaa

SEQ ID NO: 609 - DNA, 381 bp, Torque teno virus
atgccgtggagaccgccggctcataacgtccaggggcgagagagccagtggttcgcggcttgttttcacggccacgcttcgttttgcggctgcggtgactttattgggcatattaacagccttgctcctcgctttcctaacaaccaaggacccccgcatccacctgccttaaacaggccacctgcacagggcccagaaagccccgggggttccatactacccctgccagccctaccggcaccacctgatccgccaccacggcctggtggtggggaagacggtggcgacgccgcccgtggggccgctggcgccgccgaaggcgcgtatggagaagaagacctagaactgctgttcgccgccgccgaggaagacgatatgtga

SEQ ID NO: 610 - DNA, 393 bp, Torque teno virus
atgccgtggagaccgccggtgcatagtgtccaggggcgagaggatcagtggttcgcgagcttttttcacggccacgcttcattttgcggttgcggtgacgctgttggccatcttaatagcattgctcctcgctttcctcgcgccggtccaccaaggccccctccggggctagagcagcctaaccccccgcagcagggcccggccgggcccggagggccgcccgccatcttggcgctgccggctccgcccgcggagcctgacgacccgcagccacggcgtggtggtggggacggtggcgccgccgctggcgccgcaggcgaccgtggagaccgagactacgacgaagaagagctagacgagcttttccgcgccgccgccgaagacgatttgtaa

SEQ ID NO: 611 - DNA, 339 bp, Torque teno virus
atgccgtggtctctgccgagacataatatcagaacgagagaagatctctgggtgcaatcgattctttattcacatgacactttttgtggctgtgataatattcctgagcatcttactggcctcctgggcggcgtacgaccagctccacctagaaacccaggaccccctaccatacggagcctgccggcactgccgccagctccggaaccccctgaggaaccacggcgtggtggagatacagacggagaccgtggagaagatggaggagacgccgctggggcctacgaacccgaagacctagaagaacttttcgccgccgccgagcaagacgatatgtga

SEQ ID NO: 612 - DNA, 354 bp, Torque teno virus
atgtcgtggagaccgccgagccaaaatttactgcaaagagaagaggcctggtactcagcttttcttagctcgcattctacattttgcggttgtactgaccctctgctgcatattactctcattgctggccgccttactaaccccgtacccgtcacccgccaaccggagacccctcctaacggcctcagggggctgccggcactgccagcaccccctgaaccaccagcaccgccaccacggcctggggatggtaccggagaagaagatggcgcccatggagaaggagaaggtgggcgatacgcagaagaagacctagaagaactgttcgccgccgcggcagaagacgatatgtga

SEQ ID NO: 613 - DNA, 303 bp, Torque teno virus
atgtcgtgggctccgccgctattcaactcgaaacagagagaggaccagtggtaccagtcaattattttcagccataatactttttgcggctgcggtgaccttgttaggcatttttgcgtcgttgcttctcgctttactgagcctcctgtagtgccggccctaccggcaccggtaccggcaccgccacggcgtggtacagaagaagaaggtggagaccgtggagaagacgccgcagaccgtggaccctacgcagaagaagagctagaagatttgttcgccgccgcccgagaagacgatatgtga

SEQ ID NO: 614 - DNA, 345 bp, Torque teno virus
atgccgtggcatccaccgggctacaacgttcaacagagagaagagctctgggtacagacagttactacttcacatgctactttttgcggctgtggtgaccctagtagccatcttcaccgcattcttagccgccttaataacagcagccggcggccccccgaaaccccaaaccccattcgtgccctaccggccctaccggcaccccaagaacctgaacagccgccatcacggcctggtaccggtacagaagaaggccatggcgccgaaggaggcgaccgaggtggggcctacgcagaagaagatttagaagatcttttcgcggccgcggaagaagacgatatgtga

SEQ ID NO: 615 - DNA, 387 bp, Torque teno virus
atgtcgtggcgaccgccgttgcattctatccaaggcagagaagatcaatggtatgcaggcatctttcatacgcattttgctttttgcggttgtggtgaccctgttgggcgtattaaccgcattgctcaccgctttcctaacgccggtcccccgagaccacctccagggctagaccagcccaacctcggagggccggaaggtccaggaggtgcccctagagccctgccagccctgccggccccggcagagccagagccggcaccacggcgtggtggtggggccgatggagacagcgccgctggggccgccgccgccgcagaccatggagggtacgacgaaggagacctagaagatcttttcgccgccgccgccgaggacgatatgtga

SEQ ID NO: 616 - DNA, 393 bp, Torque teno virus
atgagtatttggaggcctccactgcacaatgtcccgggactcgaacacctctggtacgagtcagtgcatcgtagccatgctgctgtttgtggctgtggggatcctgtacgccatcttactgctcttgctgaaagatatggcattccgggagggtcgcggtcttctggggcaccgggagtagggggcaaccacaaccctccccagatccgtcgagcccgccacccggcggctgctccggaccccccagcaggtaaccagcctccggccctgccatggcatggggatggtggaaacgaaagcggcgctggtggtggagaaagcggtggacccgtggccgacttcgcagacgatggcctagacgatctcgtcgccgccctcgacgaagaagagtaa

SEQ ID NO: 617 - DNA, 384 bp, Torque teno virus
atgagcttctggagacctccggtgcacaatgccacggggatccagcgcctgtggtacgagtcctttcaccgtggccatgctgctttttgtggttgtggggatcctatacttcacattactgcacttgctgagacatatggccatccaacaggcccgagaccttctgggccaccgcgagtagaccccgatccccagatccgtagagccaggcctgccccggccgctccggagccctcacaggttgagccgagacctgccctgccatggcatggggatggtggaagcgacggcggcgctggtggttccggaagcggtggacccgtggcagacttcgcagacgatggcctcgatcagctcgtcgccgccctagacgacgaagagtaa

SEQ ID NO: 618 - DNA, 489 bp, Torque teno virus
atgggcaaggctcttagagtatttattcttaatatgcgcttttccagaatttacaaacagaagaagaggccactgccactgcttctggtgcgagttgaaccgaaagcattcgctagtgatatgagttggcgccctcccgttcacaatgcggcaggaattgagcgacagctccttgagggctgctttcgatttcacgctgcctgttgcggttgtggcagttttattactcatcttactatactggctgctcgctatggttttactggggggccggcgccgccaggtggtcctggggcgctgccatcgctgagacgggctcagcccgcgccggcggcccccgagaaccagcctgaaccagagctatggcgtggtcgtggtggtggaggcgacggaaacgctggtggccgcgcagaaggaggcgatggaggagatttcgcacccgaagagctagacgagctgttccgcgccgtcgccgccgacgaagagtaa

SEQ ID NO: 619 - DNA, 489 bp, Torque teno virus; identical to SEQ ID NO: 618

SEQ ID NO: 620 - DNA, 489 bp, Torque teno virus
atgggcaaggctcttagagtattcattcttaatatgcgcttttccagaatttacaaacagaagaagaggccactgccactgcttctggtgcgagttgaaccgaaagcactcgctagtgatatgagttggcgccctcccgttcacaatgcggcaggaattgagcgacagctccttgagggctgctttcgatttcacgctgcctgttgcggttgtggcagttttattactcatcttactatactggctgctcgctatggttatactggggggccggcgccgccaggtggtcctggggcgctgccatcgctgagacgggctctgcccgcgccggcggcccccgagaaccagcctgaaccagagctatggcgtggtcgtggtggtggaggcgacggaaacgctggtggccgcgcagaaggaggcgatggaggagatttcgcacccgaagagctagacgagctgttccgcgccgtcgccgccgacgaagagtaa

SEQ ID NO: 621 - DNA, 489 bp, Torque teno virus; identical to SEQ ID NO: 620

SEQ ID NO: 622 - DNA, 489 bp, Torque teno virus
atgggcaaggctcttagagtattcattcttaatatgcgcttttccagaatttacaaacagaagaagaggccactgccactgcttctggtgcgagttgaaccgaaagcactcgctagtgatatgagttggcgccctcccgttcacaatgcggcaggaattgagcgacagctccttgagggctgctttcgatttcacgctgcctgttgcggttgtggcagttttattactcatcttactatactggctactcgctatggttttactggggggccggcgccgccaggtggtcctggggcgctgccatcgctgagacgggctctgcccgcgccggcggcccccgagaaccagcctgaaccagagctatggcgtggtcgtggtggtggaggcgacggaaacgctggtggccgcgcagaaggaggcgatggaggagatttcgcacccgaagagctagacgagctgttccgcgccgtcgccgccgacgaagagtaa

SEQ ID NO: 623 - DNA, 489 bp, Torque teno virus; identical to SEQ ID NO: 622

SEQ ID NO: 624 - DNA, 492 bp, Torque teno virus
atgggcaaggctcttagggtcttcattcttaatatgttccttggcagggtttaccgccacaagaaaaggaaagtgctactgtctacactgcgagctccacaggcgtctcgcagggctatgagtcggcgacccccggtacacgatgcacccggcatcgagcgcaattggtacgaggcctgtttcagagcccacgctggagcttgtggctgtggcaattttattatgcaccttaatcttctggctgggcgttatggttttactccggggtcagcgccgccaggtggtcctcctccgggcaccccgcagataagaagagccagacctagtcccgccgcaccccaagagcccgctgctctaccatggcatggggatggtggagatggcggcgccgctggcccgccagacgctggaggagacgccgtcgccggcgccccgtacggagaacaagagctcgccgacctgctcgacgctatagaagacgacgaacagtaa

SEQ ID NO: 625 - DNA, 492 bp, Torque teno virus
atgggcaaggctcttagggtcttcattcttaatatgttccttggcagggtttaccgccacaagaaaaggaaagtgctactgtccacactgcgagctccacaggcgtctcgcagggctatgagttggcgacccccggtacacgatgcacccggcatcgagcgcaattggtacgaggcctgtttcagagcccacgctggagcttgtggctgtggcaattttattatgcaccttaatcttctggctgggcgttatggttttactccggggtcagcgccgccaggtggtcctcctccgggcaccccgcagataagaagagccagacctagtcccgccgcaccccaagagcccgctgctctaccatggcatggggatggtggagatggcggcgccgctggcccgccagacgctggaggagacgccgtcgccggcgccccgtacggagaacaagagctcgccgacctgctcgacgctatagaagacgacgaacagtaa

SEQ ID NO: 626 - DNA, 492 bp, Torque teno virus
atgggcaaggctcttagggtcttcattcttaatatgttccttggcagggtttaccgccacaagaaaaggaaagtgctactgtccacactgcgagctccacaggcgtctcgcagggctatgagttggcgacccccggtacacgatgcacccggcatcgagcgcaattggtacgaggcctgtttcagagcccacgctggggcttgtggctgtggcaattttattatgcaccttaatcttctggctgggcgttatggttttactccggggtcagcgccgccaggtggtcctcctccgggcaccccgcagataagaagagccagacctagtcccgccgcaccccaagagcccgctgctctaccatggcatggggatggtggagatggcggcgccgctggcccgccagacgctggaggagacgccgtcgccggcgccccgtacggagaacaagagctcgccgacctgctcgacgctatagaagacgacgaacagtaa

SEQ ID NO: 627 - DNA, 465 bp, Torque teno virus
atgcacttttctcgaataagcagaaagaaaaggaaagtgctactgctttgcgtgccagcagctaagaaaaaaccaactgctatgagcttctggagacctccggtgcacaatgtcacggggatccagcgcctgtggtacgagtcctttcaccgtggccatgctgctttttgtggttgtggggatcctatacttcacattacttcacttgctgagacatatggccatccaacaggcccgagaccttctgggtcatcgggaatagaccccactccgcccatccgtagagccaggcctgccccggccgctccggaaccctcacaggttgactccagaccggccctgccatggcatggagatggtggaagcgacggaggcgctggtggttccgcaagcggtggacccgtggcagacttcgcagacgatggcctcgaccagctcgtcgccgacctagacgacgaagagtaa

SEQ ID NO: 628 - DNA, 465 bp, Torque teno virus; identical to SEQ ID NO: 627

SEQ ID NO: 629 - DNA, 465 bp, Torque teno virus
atgcacttttctcgaataagcagaaagaaaaggaaagtgctactgctttgcgtgccagcagctaagaaaaaaccaactgctatgagcttctggagacctccggtgcacaatgtcacggggatccagcgcctgtggtacgagtcctttcaccgtggccatgctgctttttgtggttgtggggatcctatacttcacattacttcacttgctgagacatatggccatccaacaggcccgagaccttctgggtcatcgggaatagaccccactccgcccatccgtagagccaggcctgccccggccgctctggaaccctcacaggttgactccagaccggccctgccatggcacggagatggtggaagcgacggaggcgctggtggttccgcaagcggtggacccgtggcagacttcgcagacgatggcctcgaccagctcgtcgccgacctaaacgacgaagagtaa

SEQ ID NO: 630 - DNA, 465 bp, Torque teno virus
atgcacttttctcgaataagcagaaagaaaaggaaagtgctactgctttgcgtgccagcagctaagaaaaaaccaactgctatgagcttctggagacctccggtgcacaatgtcacggggatccagcgcctgtggtacgagtcctttcaccgtggccatgctgctttttgtggttgtggggatcctatacttcacattacttcacttgctgagacatatggccatccaacaggcccgagaccttctgggtcatcgggaatagaccccactccgcccatccgtagagccaggcctgccccggccgctccggaaccctcacaggttgactccagaccggccctgccatggcatggagatggtggaagcgacggaggcgctggtggttccgcaagcggtggacccgtggcagacttcgcagacgatggcctcgaccagctcgtcgccgacctaaacgacgaagagtaa

SEQ ID NO: 631 - DNA, 465 bp, Torque teno virus; identical to SEQ ID NO: 627

SEQ ID NO: 632 - DNA, 483 bp, Torque teno virus
atgtttttcggtagacattggcgaaagaaaagggcactgttactgtctagcttgcgaacttcaaagaagaaaccacctgcaatgagccagtggtgcccgcctgtgcacagcgttcagggtcgcaaccaccagtggtatgaagcctgctaccgtggccatgctgcttattgtggctgtggcgattttattagtcaccttgttgctctgggtaatcagtttggcttcaggccgggtccccgagctcctggcgcaccggggctagggggaccccccgttctgccccgtagagccctgccggcacccccggctgaggctccggagcaccagcagggcaacaacaacaacaaccagcagctgcagagatggcctggggatggtggaaacgcagacggcgccgatggtggagaggcctctggaggagacgccgctttgccagaagacgacctagacggcctgctcgccgccctagacgacgaagagtaa

SEQ ID NO: 633 - DNA, 483 bp, Torque teno virus
atgtttttcggtaggcattggcgaaagaaaagggcactgttactgtctagcttgcgaacttcaaagaagaaaccacctgcaatgagccagtggtgcccgcctgtgcacagcgttcagggtcgcaaccaccagtggtatgaagcctgctaccgtggccatgctgcttattgtggctgtggcgattttattagtcaccttgttgctctgggtaatcagtttggcttcgggccgggtccccgagctcctggcgcaccggggctagggggaccccccgttctgccccgtagagccctgccggcacccccggctgaggctccggagcaccagcagggcaacaacaacaacaaccagcagctgcagagacggcctggggatggtggaaacgcagacggcgccgatggtggagaggcctctggaggagacgccgctttgccagaagacgacctagacggcctgctcgccgccctagacgacgaagagtaa

SEQ ID NO: 634 - DNA, 483 bp, Torque teno virus
atgtttttcggtaggcattggcgaaagaaaagggcactgttactgtctagcttgcgaacttcaaagaagaaaccacctgcaatgagccagtggtgcccgcctgtgcacagcgttcagggtcgcaaccaccagtggtatgaagcctgctaccgtggccatgctgcttattgtggctgtggcgattttattagtcaccttgttgctctgggtaatcagtttggcttcaggccgggtccccgagctcctggcgcaccggggctagggggaccccccgttctgccccgtagagccctgccggcacccccggctgaggctccggagcaccagcagggcaacaacaacaacaaccagcagctgcagagatggcctggggatggtggaaacgcagacggcgccgatggtggagaggcctctggaggagacgccgctttgccagaagacgacctagacggcctgctcgccgccctagacgacgaagagtaa

SEQ ID NO: 635 - DNA, 465 bp, Torque teno virus
atgcacttttctcgaataagcagaaagaaaaggaaagtgctactgctttgcgtgccagcagctaagaaacaaccaactgctatgagcttctggagacctccgatacacaatgtcacggggatccagcgcctgtggtacgagtcctttcaccgtggccatgctgctttttgtggttgtggggatcctatacttcacattactgcacttgctgagacatatggccatccaacaggcccgagaccttctgggtcatcgggaatagaccccactcccccaatccgtagagccaggcccgccccggccgctccggagccctcacaggctgagtccagaccggccctgccatggcatggagatggtggaagcgacggaggcgctggtggttccgcaagcggtggacccgtggcagacttcgcagacgatggcctcgaccagctcgtcgccgccctagacgacgaagagtaa

SEQ ID NO: 636 - DNA, 471 bp, Torque teno virus
atgtttctcggcagggtgtggaggaaacagaaaaggaaagtgcttctgctggctgtgcgagctacacagaaaacatcttccatgagtatctggcgtccccctctcgggaatgtctcctacagggagagaaattggcttcaggccgtcgaaggatcccacagttccttttgtggctgtggtgattttattcttcatcttactaatttggctgcacgctttgctcttcaggggcccccgccggagggtggtcctcctcggccgaggccgccgctcctgagagcgctgccggcccccgaggtccgcagggaaacgcgcacagagaacccgggcgcctccggtgagccatggcctggcgatggtggtggcagagacgatggcgccgccgcccgtggccccgcagacggtggagacgcctacgacgccggagacctcgacgacctgttcgccgccgtcgaagacgagcaacagtaa

SEQ ID NO: 637 - DNA, 537 bp, Torque teno virus
ctgccactgctacctgtgccagctacaccgcaagaacggcctagtcgtgcgcccctgatggcctgcggacccagaggatggatgccccccaacttcgggggacacgacagagaaaatgcttggtgcaaatctgttaaattgtctcatgatgctttctgtggctgcgacgatcctcttacccatcttgctgctctgctaccaagcagacaagcttctcgtcagaatactccttctgctccacctccgcgccccccgccgccgaccccgaggcagggccagggctctgggccgcctcaggggcgaatcagaccgtcctggtccctcccggtgaccccacccgctgacgagccatggcagcctggtggtggggcaggcggagacgctggcgcaggtggaggcgccgccgcctccctcgccgccgccgctggcgacggaggagacggtggcccagaagacgcaggcggagatggccgcgcagacgcagacgtcgcagacctgctcgccgccctagaaggagacgcagacgccgaagggtaa

SEQ ID NO: 638 - DNA, 369 bp, Torque teno virus
gatcctcttacccatcttgctgctctgctaccaggcagacaagcttctcgtcagaatactccttctgctccacctccgcgccccccgccgccgaccccgaggcagggccagggctctgggccgcctcaggggcgaatcagaccgtcctggtccctcccggtgaccccacccgctgacgagccatggcagcctggtggtggggcaggcggagacgctggcgcaggtggaggcgccgccgcctccctcgccgccgccgctggcgacggaggagacggtggcccagaagacgcaggcggagatggccgcgcagacgcagacgtcgcagacctgctcgccgccctagaaggagacgcagacgccgaagggtaa

SEQ ID NO: 639 - DNA, 396 bp, Torque teno virus
tctcatgatgctttctgtggctgcgacgatcctcttacccatcttgctgctctgctaccaggcagacaagcttctcgtcagaatactccttctgctccacctccgcgccccccgccgccgaccccgaggcagggccagggctctgggccgcctcaggggcgaatcagaccgtcctggtccctcccggtgaccccacccgctgacgagccatggcagcctggtggtggggcaggcggagacgctggcgcaggtggaggcgccgccgcctccctcgccgccgccgctggcgacggaggagacggtggcccagaagacgcaggcggagatggccgcgcagacgcagacgtcgcagacctgctcgccgccctagaaggagacgcagacgccgaagggtaa

SEQ ID NO: 640 - DNA, 507 bp, Torque teno virus
caagaacggcctagtcgtgcgcccctgatggcctgcggacccagaggatggatgccccccaacttcgggggacacgacagagaaaatgcttggtgcaaatctgttaaattgtctcatgatgctttctgtggctgcgacgatcctcttacccatcttgctgctctgctaccaggcagacaagcttctcgccagaatactccttctgctccacctccgcgccccccgccgccgaccccgaggcagggccagggctctgggccgcctcaggggcgaatcagaccgtcctggtccctcccggtgaccccacccgctgacgagccatggcagcctggtggtggggcaggcggagacgctggcgcaggtggaggcgccgccgcctccctcgccgccgccgctggcgacggaggagacggtggcccagaagacgcaggcggagatggccgcgcagacgcagacgtcgcagacctgctcgccgccctagaaggagacgcagacgccgaagggtaa

SEQ ID NO: 641 - DNA, 531 bp, Torque teno virus
ctgctacctgtgccagctacaccgcaagaacggcctagtcgtgcgcccctgatggcctgcggacccagaggatggatgccccccaacttcgggggacacgacagagaaaatgcttggtgcaaatctgttaaattgtctcatgatgctttctgtggctgcgacgatcctcttacccatcttgctgctctgctaccaggcagacaagcttctcgtcagaatactccttctgctccacctccgcgccccccgccgccgaccccgaggcagggccagggctctgggccgcctcaggggcgaatcagaccgtcctggtccctcccggtgaccccacccgctgacgagccatggcagcctggtggtggggcaggcggagacgctggcgcaggtggaggcgccgccgcctccctcgccgccgccgctggcgacggaggagacggtggcccagaagacgcaggcggagatggccgcgcagacgcagacgtcgcagacctgctcgccgccctagaaggagacgcagacgccgaagggtaa

SEQ ID NO: 642 - DNA, 591 bp, Torque teno virus
atgttcctcggcaggccgtggagaaagaggagggcggccgggaagaaagggccactgccactgcaagctgtgcgagctgcatcgcaggaacggtctgacagtgcaccgctgatggcctgcggaccccggggatggatgcccccgaacttcgggggacacgagagagaaaatgcctggagccagtctgttgtactgtctcatgatgctttctgtggctgcgacgatcctgctacccatcttactgctctgctatcaggtagacaagcttctcgtcagagtactccttctgctccacctccgcgccccccgccgccgtccccgaggcagggccaggggtctcggtcacctccggggcgaatcagaccatcctggtccctcccggtagccccgccgagtgaagggccatggctgcctggtggtggggcaggaggcggcgatggcgccggtggagacggcgccgtctccctcgccgccgccgctggtgacggaggagacggtggcccaggaggcgtaggcggagatggccgcggagacgcagacgtcgcagacctgctcgccgccttagaaggagacgtcgacgcagaagggtaa

SEQ ID NO: 643 - DNA, 591 bp, Torque teno virus
atgttcctcggcaggccgtggagaaagaggagggcggccgggaagaaagggccactgccactgcaagctgtgcgagctgcatcgcaggaacggtctcacagtgcaccgctgatagcctgcggaccccggggatggatgcccccgaacttcgggggacacgagagggaaaatgcctggagccagtctgttgtactgtctcatgatgctttctgtggttgcgacgatcctgctacccatcttactactctgctatcacgcagacaagcttctcgtcagagtactccttctgctccacctccgcgccccccgccgccgtccccgaggcagggccaggggtctcggtcgcctccgggacgaatcagaccatcctggtccctcccggtagccccgccgagtgaagggccatggctgcctggtggtggggcaggaggcggcgatggcgccggtggagacggcgccgtctccctcgccgccgccgctggcgacggaggagacggtggcccaggaggcgtaggcggagatggccgcggagacgcagacgtcgcggacctgctcgccgccttagaaggagacgtcgacgcagaagggtaa

SEQ ID NO: 644 - DNA, 591 bp, Torque teno virus
atgttcctcggcaggccgtggagaaagaggagagcggcagggaagaaagggccactgccactgcaagctgtgcgggctgcatcgcaggaacggtctcacagtgcaccgctgatggcctgcggaccccggggatggatgcccccgaacttcgggggacacgagagagaaaatgcctggagccagtctgttgtactgtctcatgatgctttctgtggttgcgacgatcctgctacccatcttactactctgctatcacgcagacaagcttctcgtcagagtactccttctgctccacctccgcgccccccgccgccgtccccgaggcagggccaggggtctcggtcgcctccggggcgaatcagaccatcctggtccctcccggtagccccgccgagtgaagggccatggctgcytggtggtggggcaggaggcggcgatggcgccggtggagacggcgccgtytccctcgccgccgccgctggcgacggaggagacggtggcccaggaggcgtaggcggagatggccgcggagacgcagacgtcgcagacctgctcgccgccttagaaggagacgtcgacgcagaagggtaa

SEQ ID NO: 645 - DNA, 1083 bp, Torque teno virus
atggctgagtttatgctgcccgtccgcagagaggagccacggcgggggatccgaacgtcccgagggcgggtgccggaggtgagtttacacaccgcagtcaaggggcaattcgggctcgggactggccgggctatgggcaaggctcttaaaaaagccatgtttctcggtaaattacacagaaagaagagggcactgtcactgcacggcctgccagctacaaagaaaaaaccacctcctgatatgaactactggaggccgcctgtgcacaatgtcccggggctcgaacgcctctggtacgagtccgtgcatcgtagccatgctgctgtttgtggttgtggggattttgtacgccatattactgctctggctgagagatacggccaccctgggggaccgcgcgcgcctggggcaccgggaatagggggcaatcccaattctcccccgatccgtcgagcccgccacccggcggccgctccggagcccccagcaggtaaccagcctccggccctgccatggcatggggatggtggaaacgaaggcgcaagtggtggtggagacgacgctggactcgtggccgacttcgcaaacgacgggctagacgagctggtcgccgccctcgacgaagaagagtcccaaaaaacccagggtcgacctcgggccaatccaacagcaagaaaggccctccgattcactccaaagagaatcgaggccgtgggagaccagcgaagaagagagcgaagcagaagtccagcaagaagagacggaggaggtgcccctcagacagcaactcctccacaacctcagagagcagcagcaactccgaaagggcctccagtgcgtcttccagcagctaataaagacgcagcagggggttcacatagacccatccctactgtaggccccagtcagtggctcttccccgagagaaagcctaaaccccctccatcggccggagactgggccatggagtacctagcttgcaagatattcaacaggccgccccgcactcaccttacagaccctcctttctacccctactgcaaaaacaattacaatgtaacctttcagctcaactacaaataa

SEQ ID NO: 646 - DNA, 1056 bp, Torque teno virus
atggctgagtttatgctgcccgtccgcagagaggagccacggcgggggatccgaacgtcccgagggcgggtgccggaggtgagtttacacaccgcagtcaaggggcaattcgggctcgggactggccgggctatgggcaaggctcttaaaaaagccatgtttctcggtaaattacacagaaagaagagggcactgtcactgcacggcctgccagctacaaagaaaaaaccacctcctgatatgaactactggaggccgcctgtgcacaatgtcccggggctcgaacgcctctggtacgagtccgtgcatcgtagccatgctgctgtttgtggttgtggggattttgtacgccatattactgctctggctgagagatacggccaccctgggggaccgcgcgcgcctggggcaccgggaatagggggcaatcccaattctcccccgatccgtcgagcccgccacccggcggccgctccggagcccccagcaggtaaccagcctccggccctgccatggcatggggatggtggaaacgaaggcgcaagtggtggtggagacgacgctggactcgtggccgacttcgcaaacgacgggctagacgagctggtcgccgccctcgacgaagaagagttgttagagacccctgcactcagcccaccttcgaactgcccggagccagtacgcagcctccacgaatacaagtcacggacccgaaactcctcggtccccactactcattccactcgtgggacctcagacgtggctactatagcacaaagagtattaaacgaatgtcagaacacgaagaaccttctgagtttattttcccaggtcccaaaaaacccagggtcgacctcgggccaatccaacagcaagaaaggccctccgattcactccaaagagaatcgaggccgtgggagaccagcgaagaagagagcgaagcagaagtccagcaagaagagacggaggaggtgcccctcagacagcaactcctccacaacctcagagagcagcagcaactccgaaagggcctccagtgcgtcttccagcagctaa

SEQ ID NO: 647 - DNA, 633 bp, Torque teno virus
atggctgagtttatgctgcccgtccgcagagaggagccacggcgggggatccgaacgtcccgagggcgggtgccggaggtgagtttacacaccgcagtcaaggggcaattcgggctcgggactggccgggctatgggcaaggctcttaaaaaagccatgtttctcggtaaattacacagaaagaagagggcactgtcactgcacggcctgccagctacaaagaaaaaaccacctcctgatatgaactactggaggccgcctgtgcacaatgtcccggggctcgaacgcctctggtacgagtccgtgcatcgtagccatgctgctgtttgtggttgtggggattttgtacgccatattactgctctggctgagagatacggccaccctgggggaccgcgcgcgcctggggcaccgggaatagggggcaatcccaattctcccccgatccgtcgagcccgccacccggcggccgctccggagcccccagcaggtaaccagcctccggccctgccatggcatggggatggtggaaacgaaggcgcaagtggtggtggagacgacgctggactcgtggccgacttcgcaaacgacgggctagacgagctggtcgccgccctcgacgaagaagagtaa

SEQ ID NO: 648 - DNA, 150 bp, Torque teno virus
atggctgagttttccacgcccgtccgcagcgagatcgcgacggaggagcgatcgagcgtcccgagggcgggtgccgaaggtgagtttacacaccggagtcaaggggcaattcgggctcgggactggccgggctatgggcaaggctcttaa

SEQ ID NO: 649 - DNA, 150 bp, Torque teno virus
atggctgagttttccatgcccgtccgcagcggtgaagccacggagggagctcagcgcgtcccgagggcgggtgccgaaggtgagtttacacaccgaagtcaaggggcaattcgggctcgggactggccgggctatgggcaaggctcttaa

SEQ ID NO: 650 - DNA, 150 bp, Torque teno virus
atggctgagttttctatgcccgtccgcagcggcgaagccacggagggagctcagcgcgtcccgagggcgggtgccggaggtgagtttacacaccgaagtcaaggggcaattcgggctcgggactggccgggctatgggcaaggctcttaa

SEQ ID NO: 651 - DNA, 456 bp, Torque teno virus
atgcacttttctaggatatccagaaagaaaaggctactgctactgcaaacagtgccagctccacagaaaactttcaaacttttaagaggtatgtggagtcctcccactgacgatgaacgtgtccgcgagcgaaaatggttcctcgcaactgtttattctcactctgctttctgtggctgcaatgatcctgtcggtcacctctgtcgcttggctactctttctaaccgtccggagaacccgggaccctccgggggacgtcgtgctccttcgatcggggtcctacccgctctcccggctgctaccgagcagcccggtgatcgagcaccatggcctatgggtggtggaggagacgccgcagaaggtggaagagatggaggagaaggcccaggtggagacgcccatggaggacccgcagacgcagacctgctagacgccgtggacgccgcagaacagtaa

SEQ ID NO: 652 - DNA, 456 bp, Torque teno virus
atgcacttttctaggatacgcagaaagaaaaggctactgctactgcaaacagtgccagctccacagaaaactctcaaacttttaaaaggtatgtggagtcctcccaccgacgatgaacgtgtccgcgagcgaaaatggttcctcgcaactatttattctcactctactttctgtggctgcaatgatcctgtcggtcacttctgtcgcctggctactctgtctaaccgcccggaaaacccgggaccctccggaggacgtagtgctcctcagatcgggctcctacccgctctcccggctgctcccgagcaacccggtgatcgagcaccatggcttatgggtggtggaggagacgccgcaggaggtggaagagatggaggagaaggcccaggtggagacgcccatggaggacccgcagacgcagacctgctggacgccgtggacgccgcagaacagtaa

SEQ ID NO: 653 - DNA, 456 bp, Torque teno virus
atgcacttttctaggatacacagaaagaaaaggctactgccactgcaaacagtgccaactccacagaaaactctcaaacttttaaaaggtatgtggagtcctcccaccgacgatgaacgtgtccgcgagcgaaaatggttcctcgcaactatctattctcactctactttctgtggctgcaatgatcctgtcgctcatttctgtcgcctggctactctctctaaccgcccggaaaacccgggaccctccggaggacgtagtgctcctcagatcgggctcctacccgctctcccggctgctcccgagcaacccggtgatcgagccccatggcctatgggtggtggaggagacgccgcaggaggtggaagagatggaggagaaggcccaggtggagacgccgctggaggacccgcagacgcagacctgctggacgccgtagacgccgcagaacagtaa

SEQ ID NO: 654 - DNA, 453 bp, Torque teno virus; identical to SEQ ID NO: 588

SEQ ID NO: 655 - DNA, 174 bp, Torque teno virus
atgtttggtgaccccaaaccttacaacccttccagtaatgactggaaagaggagtacgaggcctgtagaatatgggacagaccccccagaggcaacctaagagacacccctttctacccctgggcccccaaggaaaaccagtaccgtgtaaactttaaacttggatttcaataa

SEQ ID NO: 656 - DNA, 345 bp, Torque teno virus
atgatgaatatgttgcagggcctttaccaagaaaaagaaacaaattcgataccagagcccaagggctgcaaacccccgaaaaagaaagctacactttactccaagccctccaagagtcggggcaagagaccagctcagaagaccaagaacaagcaccccaagaaaaagagggtcagaaggaagcgctcatggagcagctccagctccagaaacagcaccagcgagtcctcaagcgaggcctcaaactcctcctcggagacgtcctccgactccggagaggagtccactgggaccccctcctgtcataattcagggcccctctatcccagacctgcttttccctaa

SEQ ID NO: 657 - DNA, 345 bp, Torque teno virus
atgatgaatatgttgcagggcctttaccaagaaaaagaaacaagttcgataccagagcccaagggctccaaagccccgaaaaagaaagctacactttactccaagccctccaagagtcggggcaagagagcagctcagaagaccaagaacaagcaccccaagaaaaagagggtcagaaggaagcgctcatggagcagctccagctccagaaacagcaccagcgagtcctcaagcgaggcctcaaactcctcctcggagacgttctccgactccggagaggagtacactgggaccccctcctgtcataattcagggcccctctatcccagacctacttttccctaa

SEQ ID NO: 658 - DNA, 345 bp, Torque teno virus
atgatgaatatgttgcagggcctttaccaagaaaaagaaacaagttcgataccagagcccaagggctccaaagccccgaaaaagaaagctacactttactccaagccctccaagagtcggggcaagagacgagctcagaagaccaagaacaagcaccccaagaaaaagagggtcagaaggaagcgctcatggagcagctccagctccagaaacagcaccagcgagtcctcaagcgaggcctcaaactcctcctcggagacgttctccgactccggagaggagtacactgggaccccctcctgtcataattcagggcccctctatcccagacctgcttttccctaa

SEQ ID NO: 659 - DNA, 783 bp, Torque teno virus
atgagctttgtagaacccttactaaccagcacccacagagagatagcatactaccatggctgtgttcagatgcacaaagccttctgtgggtgtgacaactttcttacccacctgcaacgcataacaacatacatctctgctaaccaacacactccacccagcacaccctcaaacaccctccgtagagcccgggccctgcccgcggctccggagccagctccatggcgtggacctggtggtggcagaggaggcgccgaaggtggccgtggagaaggagaaggtggagaagactacgcacaagaagacctagacgccttgttcgacgccgtcgcaagagatacagagttatcagaaacccttgtaaaacagaaggacacgatctccctcacaccagtagactccatcgcgacttacaagttgttgacccacacaccgtgggcccccaatgggcgctccacacctgggactggcgacgtggactctttggttcagaggctatcaaaagagtgtctgaacaacaagtacatgatgaactgtattacccaccttcaaagaaacctcgattcctccctccaatatcaggcctccaagagcaagaaagagactacagttcgcaggaggagaaagaacagtcctcctcagaagaagagacggacccgaagaaaaaagagcaaaaacagcagcagcgactccacctccagttccaagagcagcagcgactcggaaaccaactccgactcatcttccgagagctacagaaaacccaagcgggtctccacttaa

SEQ ID NO: 660 - DNA, 528 bp, Torque teno virus
atggcgtggtcgtggtggtggaggcgaaggaaacgctggtggccgcgcagaaggaggcgatggagaaggctacgaacccgaagaactggaagagctgttccgcgccgccgccgccgacgacgagtaaggaggcgccggtgggggaggcgaccgcgtaggagacgggtgtactataagagacgcagacgaaagactggcagactgtatagaaagcctaaaaaaaaactagtactgactcaatggcaccccactacagttagaaactgctccatacggggcttagtgcccctagtcctctgcggacacacacagggaggcagaaactttgctttgaggagcgatgactaccccaaacaaggcaccccatacgggggcagcttcagcactacaacctggaacctcagggtgcttttcgacgagcaccaaaaacaccacaatacgtggagctatccaagcaatcaactagacctagccagatttagaggcagcatattttactttacagagacaaaaaaactgactacatag

SEQ ID NO: 661 - DNA, 783 bp, Torque teno virus
atgagctggtgtactccagttgaaaatgcctataagagagagatccactttctcaggggctgtcaactgcttcacactagcttttgtggttgcgatgattttattaatcatattattcgcctacaaaatcttcacggcaacctacaccagcccacgggaccgtccacacctccagtgacccgtagagctctggccttgccggctgctccggagtcatggcgttccggtggtggtggtggagacgccgcccgcagcgacgatggacccggcgccgatggaggagactacgaacccgccgacctagacgcactgtacgacgccgtcgccgcagaccaagaattatcaaaaacccgtgtaaaaaagaagaatccacattcacctatcccagtagagagcctcgcgacctacaagttgttgacccactcaccatgggcccagaatgggtcttccacacatgggactggagacgtggactttttggtaaaaatgctgtcgacagagtgtcaaaaaaaccagacgatgatgcagaatattatccagtaccaaaaaggcctcgattcttccctccaacagacacacagtcagagccagaaaaagacttcggtttcacaccggagagccaagagttacagcaagaagacttacgagcaccccaagaagaaagccaagaggtacagcagcagcgactgctccagctcagactctcacagcagttcagactcagacagcagctccagcacctgttcgtacaagtcctcaaaacccaagcaggtctccacataa

SEQ ID NO: 662 - DNA, 783 bp, Torque teno virus
atgagctttgtagaaccgttactaagcagcacccaccgagagatagcattctaccatggctgtgttcaaatgcacaaggccttctgtggctgtgacaactttcttacccacctgcagcgcataacaacatacatctctgctaatcaacacactccacccagcacaccctcaaacaccctccgtagagcccgggccctgcccgcggctccggagccagctccatggcgtggacctggtggtggcagaggaggcgccgaaggtggccgtggagaaggagaaggtggagaagactacgcaccagaagacctagacgacttgttcgccgccgtcgcaagagatacagagttatcagaaacccttgtaaaacagaaggacacgatctccctcacaccagtagactccatcgcgacttacaagttgttgacccacacaccgtgggcccccaatgggcgctccacacctgggactggcgacgtggactctttggttcagaggctatcaaaagagtgtctgaacaacaagtacatgatgaactgtattacccagcttcaaagaaacctcgattcctccctccaatatcaggcctccaagagcaagaaagagactacagttcgcaggaggaaaaagaccagtcctcctcagaagaagagaaggacccgaagaaaaaagagcaaaaacagcagcagcgactccacctccagttccaagagcagcagcgactcggaaaccaactccgactcatcttccgagagctacagaaaacccaagcgggtctccacataa

SEQ ID NO: 663 - DNA, 843 bp, Torque teno virus
atgagtctgtggcgacccccggtccacaatgcccccggcagagagagactttggtttcaggcctgttacgaatctcacagtgctttttgtggctgtggtagctttattcttcatcttactagcttggctgcacgttttaattttcaggccgggccaccgcctcccgggggtccccgggcggagaccccgccgattctgagggcgctgccggcaccccagccgcgccgccaccgccagacggagaaccccgggtctgagccatggcctggagatggtggtggagacggcgctggaagccaagaaggcggccagcgtggaccaagtaccgcagacgcaggtggagacgacttcgaccccgcagacctagaagacttgctcgcggccgtcgaagaagacgaacagtcatcaaagacccgtgcagctcctcaggactggcacctaccgactccagtagattcaagcgggatgtacaagtcgttagcccgctcacaatggggccccgactgctattccactcgttcgaccaaagacgagggttctttactccaggagctatcaaacgaatgcatgatgaacaaattaatgttccagactttacacaaaaacctaaaatcccgcgaattttcccaccagtcgagctccgagaaagagcagaagccgaagaagactcaggttcggaaaaagcgtcgttcacctcgtcgcaagagagagaagccgaagcccaagaaaagttaccgatacagctccagctcagacagcagctcagacaacaacagcagctccgagtccacttgcagcaagtcttcctccaactccaaaaaacgaaggcacatttacatataa

SEQ ID NO: 664 - DNA, 822 bp, Torque teno virus
atgaatctctggcgaccccctctgagaaatatcccccacagggagagatgttggcttgaggcctgtctcagagcccacgattctttttgtggctgtcctagtcctattgttcatttttctagtctggttgcacgttttaatctacaaggaggcccgccgccagaggatgactccccacagggcgcgccagtcctgagggccctgccggcaccgagcccccacaggcacacccgcacggagaacccctccggtgagccatggcctactcctactggtggcgccgccggaggtggccgtggagaggccgatggaggcgctggaggcgccgcagacgaataccgcgccgaagacctagacgacctgttcgccgctatcgaaggagaccaacgatcagaaacccgtgcacctcggacggacagacgcccacaaccagtagacagtctagagaggtacaaatcgttgacccgctcaccatgggaccccgatacgtattccactcgtgggactggcgacgtgggtggcttaatgacagaactctcaaacgcttgttccaaaaaccgctcgattttgaagagtatccaaaatctccaaagagacctagaattttcccacccacagagcagctccaagaagacccgcaagagcaagaaagagactcctcttcttcggaagaaagtctccctacatcgtcagaagagacaccgccagcccacctactcagagtacacctcagaaagcagctccggcaacagcgagacctccgagtccagctcagagccctgttcgcccaagtcctcaaaacgcaagcgggcctacacataa

SEQ ID NO: 665 - DNA, 837 bp, Torque teno virus
atgccgtggagaccgccggctcataacgtccaggggcgagagagccagtggttcgcggcttgttttcacggccacgcttcgttttgcggctgcggtgactttattgggcatattaacagccttgctcctcgctttcctaacaaccaaggacccccgcatccacctgccttaaacaggccacctgcacagggcccagaaagccccgggggttccatactacccctgccagccctaccggcaccacctgatccgccaccacggcctggtggtggggaagacggtggcgacgccgcccgtggggccgctggcgccgccgaaggcgcgtatggagaagaagacctagaactgctgttcgccgccgccgaggaagacgatatgcaatcgacgacccctgccagcagggaacccacccgcttcccgagcccggtacgttgcctagaatcttacaagtcagcgacccgacgcaactcggaccgaaaaccatattccacctctgggaccagaggcgtggactttttagcaaaagaagtattgaaagaatgtcagaatacaaaggaactgatgacttattttcaccaggtcgcccaaagcgcccaaagctcgacacacgtcccgaaggactaccagaggagcaaagaggagcttacaatttactccaagccctcgaagactcagcccagtcggaagaaagcgaccaagaagaaatgcctcccctcgaagaagaacaagtactccacgagcaaaagaaagaggcgctcctccagcagctccagcagcagaaacaccaccagcgagtcctcaagcgaggcctcagactcctcctcggagacgtcctga

SEQ ID NO: 666 - DNA, 888 bp, Torque teno virus
atgccgtggagaccgccggtgcatagtgtccaggggcgagaggatcagtggttcgcgagcttttttcacggccacgcttcattttgcggttgcggtgacgctgttggccatcttaatagcattgctcctcgctttcctcgcgccggtccaccaaggccccctccggggctagagcagcctaaccccccgcagcagggcccggccgggcccggagggccgcccgccatcttggcgctgccggctccgcccgcggagcctgacgacccgcagccacggcgtggtggtggggacggtggcgccgccgctggcgccgcaggcgaccgtggagaccgagactacgacgaagaagagctagacgagcttttccgcgccgccgccgaagacgatttggaacccacccgattcccgaccccgataagcaccctcgcctcctacaagtgtcgaacccgaaactgctcggaccgaggacagtgttccacaagtgggacatcagacgtgggcagtttagcaaaagaagtattaaaagagtgtcagaatactcatcggatgatgaatctcttgcgccaggtctcccatcaaagcgaaacaagctcgactcggccttcagaggagaaaacccagagcaaaaagaatgctattctctcctcaaagcactcgaggaagaagagaccccagaagaagaagaaccagcaccccaagaaaaagcccagaaagaggagctactccaccagctccagctccagagacgccaccagcgagtcctcagacgagggctcaagctcgtctttacagacatcctccgactccgccagggagtccactggaaccccgagctcacatagagcccccaccttacataccagacctactttttcccaatactggtaa

SEQ ID NO: 667 - DNA, 870 bp, Torque teno virus
atgccgtggtctctgccgagacataatatcagaacgagagaagatctctgggtgcaatcgattctttattcacatgacactttttgtggctgtgataatattcctgagcatcttactggcctcctgggcggcgtacgaccagctccacctagaaacccaggaccccctaccatacggagcctgccggcactgccgccagctccggaaccccctgaggaaccacggcgtggtggagatacagacggagaccgtggagaagatggaggagacgccgctggggcctacgaacccgaagacctagaagaacttttcgccgccgccgagcaagacgatatcccattgacgacccctgccaaaaaggaaaacacgacattcccgaccccgatacaaaccctccaagaatacaaatatcagacccgcaacacctcggaccggcgacgctgttccactcgtgggacctcagacgtggatatattaatacaaaaagtattaaaagaatctcagaacacctcgatgctaatgaatatttttcgacaggcgtcgtgtccaaaaaaccccgattcgacactccccaccacgggcagctatcaaaccaagaagaagacgccttgtctatcctcagacaaccccaaaaagagcaagaagagaccacctccgaggaagaacaagcactccaaaaagaagaggagcaaaaagaaaagctcctacagcaactcagagtccagcgacagcaccagcgagtcctcagacagggaatcaaacacctcatgggagacgtcctccgactcagacagggagtccactggaacccagtcctataatacttccaccagaaccaataccagacctcttattccccaatactggtaa

SEQ ID NO: 668 - DNA, 876 bp, Torque teno virus
atgtcgtggagaccgccgagccaaaatttactgcaaagagaagaggcctggtactcagcttttcttagctcgcattctacattttgcggttgtactgaccctctgctgcatattactctcattgctggccgccttactaaccccgtacccgtcacccgccaaccggagacccctcctaacggcctcagggggctgccggcactgccagcaccccctgaaccaccagcaccgccaccacggcctggggatggtaccggagaagaagatggcgcccatggagaaggagaaggtgggcgatacgcagaagaagacctagaagaactgttcgccgccgcggcagaagacgatatcctatcgacgacccctaccaaaaacccacccacgaaatacccgaccccgataagcaccctccaagactacaaattgcagacccgaaaatcctcggaccgtcgacagtcttccacacatgggacatcagacgtggcctctttagcacagcaagtcttaagagagtgtcagaataccaaccgcctgatgaccttttttcaacaggcgtcgcatccaaaagaccccgattcgacactccagtccaagggcagctcgaaagccaagaagaagaaagctatcgtttactcagagcactccaaaaagagcaagagacaagcagctcggaagaggagcagccacaaaaccaagagatccaagaaaaactactcctccagctccagcagcagcgacaacagcagcgactcctcgcaaagggaatcaagcacctcctcggagatgtcctccgactccgaaaaggagtccactgggacccggtccttacatagcacctccagaacctatcccagaccttttgttccccagtactaa

SEQ ID NO: 669 - DNA, 834 bp, Torque teno virus
atgtcgtgggctccgccgctattcaactcgaaacagagagaggaccagtggtaccagtcaattattttcagccataatactttttgcggctgcggtgaccttgttaggcatttttgcgtcgttgcttctcgctttactgagcctcctgtagtgccggccctaccggcaccggtaccggcaccgccacggcgtggtacagaagaagaaggtggagaccgtggagaagacgccgcagaccgtggaccctacgcagaagaagagctagaagatttgttcgccgccgcccgagaagacgatatcccatcgacgacccctgccaaaaagacacccacgaaatacccgaccccgataaacaccctagaggaatacaaatatcagacccgaaggtactcggaccacccacagtcttccacacatgggacatcagacgtggactgtttagctcgacgagtcttaaaagagtgtcagaataccaaccgcctgatgaccctttttcaacaggcgtcgtcttcaaaagaccccgactggaaacccagtacaaaggaacccaagaaaccccagaagaagacgcctacactttactcaaagcactccaaaaagagcaagagagcagcagctcggaagaagaactcccacaagaagagcaagagatccaaaaaacacaactcctcaagcagctccaactccagcagcagcaacagcgaatcctcaagaggggaatcagacacctcttcggagacgtcctccgactcagaaaaggagtccactccaacccagacctattataataccagcagaggaaatcccagacctgcttttccccaatactggtaa

SEQ ID NO: 670 - DNA, 873 bp, Torque teno virus
atgccgtggcatccaccgggctacaacgttcaacagagagaagagctctgggtacagacagttactacttcacatgctactttttgcggctgtggtgaccctagtagccatcttcaccgcattcttagccgccttaataacagcagccggcggccccccgaaaccccaaaccccattcgtgccctaccggccctaccggcaccccaagaacctgaacagccgccatcacggcctggtaccggtacagaagaaggccatggcgccgaaggaggcgaccgaggtggggcctacgcagaagaagatttagaagatcttttcgcggccgcggaagaagacgatatcccatcgacgacccatgccaaaagcccacccacgaccttcccgaccccgatagacaccccccaagaatacaaatctcggacccggcaagactcggaccggagacgctcttccactcatgggacatcagacgtggatacattaacacaaaagctattaaaagaatctcagattacacagaatctaatgactatttttcaacaggcgtcgtgtcaaaaagaccccgattggaaacccagtaccacggccaacacgaaagccaagaagaagacgcctatcttttactcaaacaactccaggaagagcaagaaacgagcagttcggagggagaacaagcaccccaagaaaaaacactccaaaaagaaaagctcctcaagcagctgcagctccacaagcagcagcagcaactcctcagaaaaggaatcagacacctcctcggggacgtcctccgactcagacggggagtccactgggacccaggcctatagtactgcctccagagcctattccagacttgcttttcccaaatactaa

SEQ ID NO: 671 - DNA, 909 bp, Torque teno virus
atgtcgtggcgaccgccgttgcattctatccaaggcagagaagatcaatggtatgcaggcatctttcatacgcattttgctttttgcggttgtggtgaccctgttgggcgtattaaccgcattgctcaccgctttcctaacgccggtcccccgagaccacctccagggctagaccagcccaacctcggagggccggaaggtccaggaggtgcccctagagccctgccagccctgccggccccggcagagccagagccggcaccacggcgtggtggtggggccgatggagacagcgccgctggggccgccgccgccgcagaccatggagggtacgacgaaggagacctagaagatcttttcgccgccgccgccgaggacgatatgcaatcgacgacccctgccagaagcccacccatgagctacccgatcccgatagacaccctcgcatgttacaagtctctgacccgacaaagctcggaccgaagacagtgttccacaaatgggactggagacgtgggcaacttagcaaaagaagtattaaaagagtccaagaagactcaacggatgatgaatatgttacagggcctttatcaagaaaaagaaacaagctcgacacaaagatgccaggccccccaacccccgaaaaagaaagctacactttactccaagccctccaagagtcgggccaggagagcagctcccaggacgaagaacaagcaccccaaaaagaagagaaccagaaagaagcgctcgtggagcagctccagctccagaaacagcaccagcgagtcctcaagcgaggcctcaaactcctcttgggagacgtcctccgactccgccgcggagtccactgggaccccctcctatcctaattcagggtccctctatcccagacctgcttttccctaa

SEQ ID NO: 672 - DNA, 819 bp, Torque teno virus
atgagtatttggaggcctccactgcacaatgtcccgggactcgaacacctctggtacgagtcagtgcatcgtagccatgctgctgtttgtggctgtggggatcctgtacgccatcttactgctcttgctgaaagatatggcattccgggagggtcgcggtcttctggggcaccgggagtagggggcaaccacaaccctccccagatccgtcgagcccgccacccggcggctgctccggaccccccagcaggtaaccagcctccggccctgccatggcatggggatggtggaaacgaaagcggcgctggtggtggagaaagcggtggacccgtggccgacttcgcagacgatggcctagacgatctcgtcgccgccctcgacgaagaagaattgttaaagacccctgcacccagcccacctttgaaatacccggtggcggtaacatccctcgcagaatacaagtcatcaatccgaaagtcctcggacccagctacagtttcagatcctttgacctcagacgtgacatgtttagcggctcgagtcttaaaagagtctcagaacaacaagagacttctgagtttttattctccggcggcaaacgccccaggatcgaccttcccaagtacgtcccgccagaagaagacttcaatatccaagagagacaacaaagagaacagagaccgtggacgagcgaaagcgagagcgaagcagaagcccaagaagagacgcaggcgggctcggtccgagagcagctccagcagcagctccaagagcagtttcaactccgaagagggctcaagtgcctcttcgagcagttag

SEQ ID NO: 673 - DNA, 819 bp, Torque teno virus
atgagcttctggagacctccggtgcacaatgccacggggatccagcgcctgtggtacgagtcctttcaccgtggccatgctgctttttgtggttgtggggatcctatacttcacattactgcacttgctgagacatatggccatccaacaggcccgagaccttctgggccaccgcgagtagaccccgatccccagatccgtagagccaggcctgccccggccgctccggagccctcacaggttgagccgagacctgccctgccatggcatggggatggtggaagcgacggcggcgctggtggttccggaagcggtggacccgtggcagacttcgcagacgatggcctcgatcagctcgtcgccgccctagacgacgaagaattgtacaagatccctgcacacagtccacctatgacatccccggcaccggtaacttgcctcgcagaatacaagtcattgacccgaaagtcctcggtccccactactcattccaccgctgggacttcaggcgtggcctctttggccaacaagctattaagagagtgtcagaacaaccaacaacttctgagtttttattctcaggtccaaagagacccagaatcgatcaagggccttacatcccgccagaaaaaggctcagattcactccaaagagaatcgagaccgtggagcaactcggagaccgaggcagagacagaagccccctcggaagaagagccggagaaccaagaagaacaagtactccagttgcagctccgacagcagctccgagaacagcgaaaactcagacagggaatccagtgcctcttcgagcaactga

SEQ ID NO: 674 - DNA, 318 bp, Torque teno virus
atgctatccagagagtgtcacaaaaaccggaagatgctctccgctttacaaaccctttcaagagacccagatatcttcccccgacagacggagaagactaccgacaagaagaagacttcgctttacaggaaagaagacggcgcacatccacagaagaagtccaggacgaggagagccccccgcaaaacgcgccgctcctacagcagcagcagcagcagcgggagctctcagtccagcacgcggagcagcagcgactcggagtccaactccgatacatcctccaagaagtcctcaaaacgcaagcgggtctccacctaa

SEQ ID NO: 675 - DNA, 750 bp, Torque teno virus
atgagctttgtagaacccttactaaccagcacccacagagagatagcatactaccatggctgtgttcagatgcacaaagccttctgtgggtgtgacaactttcttacccacctgcaacgcataacaacatacatctctgctaaccaacacactccacccagcacaccctcaaacaccctccgtagagcccgggccctgcccgcggctccggagccagctccatggcgtggacctggtggtggcagaggaggcgccgaaggtggccgtggagaaggagaaggtggagaagactacgcacaagaagacctagacgccttgttcgacgccgtcgcaagagatacagagcctccaagagcaagaaagagactacagttcgcaggaggagaaagaacagtcctcctcagaagaagagacggacccgaagaaaaaagagcaaaaacagcagcagcgactccacctccagttccaagagcagcagcgactcggaaaccaactccgactcatcttccgagagctacagaaaacccaagcgggtctccacttaaatcctatgttatcaaaccggctgtaaataaagtttacctttttcctcccgaggggcctaaacccatctctggctacagagcatgggaagacgaatttaccacctgtaagtactgggacaggcctagtagaattaaccacacagacccccccttttacccctggatgcctaaatacaatgtaaccttcaaacttggctggaaataa

SEQ ID NO: 676 - DNA, 765 bp, Torque teno virus
atgagctggtgtactccagttgaaaatgcctataagagagagatccactttctcaggggctgtcaactgcttcacactagcttttgtggttgcgatgattttattaatcatattattcgcctacaaaatcttcacggcaacctacaccagcccacgggaccgtccacacctccagtgacccgtagagctctggccttgccggctgctccggagtcatggcgttccggtggtggtggtggagacgccgcccgcagcgacgatggacccggcgccgatggaggagactacgaacccgccgacctagacgcactgtacgacgccgtcgccgcagaccaagaacacacagtcagagccagaaaaagacttcggtttcacaccggagagccaagagttacagcaagaagacttacgagcaccccaagaagaaagccaagaggtacagcagcagcgactgctccagctcagactctcacagcagttcagactcagacagcagctccagcacctgttcgtacaagtcctcaaaacccaagcaggtctccacataaacccattatttttaaaccatgcataaatcaggtctttatgtttccaccagacacccccagacctattataactaaagaaggctgggaggatgagtttgtcacctgcaaacactgggataggccagctagatcatactacacagacacacctacttacccttggatgcccaaggcaccccctcaatgcaatgtaagctttaaacttggctttaaataa

SEQ ID NO: 677 - DNA, 750 bp, Torque teno virus
atgagctttgtagaaccgttactaagcagcacccaccgagagatagcattctaccatggctgtgttcaaatgcacaaggccttctgtggctgtgacaactttcttacccacctgcagcgcataacaacatacatctctgctaatcaacacactccacccagcacaccctcaaacaccctccgtagagcccgggccctgcccgcggctccggagccagctccatggcgtggacctggtggtggcagaggaggcgccgaaggtggccgtggagaaggagaaggtggagaagactacgcaccagaagacctagacgacttgttcgccgccgtcgcaagagatacagagcctccaagagcaagaaagagactacagttcgcaggaggaaaaagaccagtcctcctcagaagaagagaaggacccgaagaaaaaagagcaaaaacagcagcagcgactccacctccagttccaagagcagcagcgactcggaaaccaactccgactcatcttccgagagctacagaaaacccaagcgggtctccacataaatcctatgttatcaaaccggctataaataaagtttacctttttcctcccgaggggcctaaacccatctctggctacagagcatgggaagatgagttcacctgctgtaagtactgggacaggcctagtagaattaaccacacagacccccccttctacccctggatgcctaagtacaatgtaacctttaaacttggctggaaataa

SEQ ID NO: 678 - DNA, 822 bp, Torque teno virus
atgagtctgtggcgacccccggtccacaatgcccccggcagagagagactttggtttcaggcctgttacgaatctcacagtgctttttgtggctgtggtagctttattcttcatcttactagcttggctgcacgttttaattttcaggccgggccaccgcctcccgggggtccccgggcggagaccccgccgattctgagggcgctgccggcaccccagccgcgccgccaccgccagacggagaaccccgggtctgagccatggcctggagatggtggtggagacggcgctggaagccaagaaggcggccagcgtggaccaagtaccgcagacgcaggtggagacgacttcgaccccgcagacctagaagacttgctcgcggccgtcgaagaagacgaacatcgagctccgagaaagagcagaagccgaagaagactcaggttcggaaaaagcgtcgttcacctcgtcgcaagagagagaagccgaagcccaagaaaagttaccgatacagctccagctcagacagcagctcagacaacaacagcagctccgagtccacttgcagcaagtcttcctccaactccaaaaaacgaaggcacatttacatataaacccactatttttggcccaagggaacatgtaaacatgttcggtgagtacccagataggaagcccactaaggaagattggcagaccgagtatgagacctgcagagcctttgatagaccccctagaaccttactcacagatccccctttctacccctggatgcctaaacaaccccccacctatcgtgtatccttcaaacttggctttcaataa

SEQ ID NO: 679 - DNA, 807 bp, Torque teno virus
atgaatctctggcgaccccctctgagaaatatcccccacagggagagatgttggcttgaggcctgtctcagagcccacgattctttttgtggctgtcctagtcctattgttcatttttctagtctggttgcacgttttaatctacaaggaggcccgccgccagaggatgactccccacagggcgcgccagtcctgagggccctgccggcaccgagcccccacaggcacacccgcacggagaacccctccggtgagccatggcctactcctactggtggcgccgccggaggtggccgtggagaggccgatggaggcgctggaggcgccgcagacgaataccgcgccgaagacctagacgacctgttcgccgctatcgaaggagaccaagcagctccaagaagacccgcaagagcaagaaagagactcctcttcttcggaagaaagtctccctacatcgtcagaagagacaccgccagcccacctactcagagtacacctcagaaagcagctccggcaacagcgagacctccgagtccagctcagagccctgttcgcccaagtcctcaaaacgcaagcgggcctacacataaaccccctcttattggccccgcagtaaacaaggtctacttgttccctgacagggcccctaaacctccacctagctcgggagactgggccacggagtacgcggcggccgccgccttcgatagaccccccagaggcaacctgtcagacaaccccttctatccctggatgccaacaaacaccaaattctctgtaacctttaaactggggtggaaaccctga

SEQ ID NO: 680 - DNA, 894 bp, Torque teno virus
atgccgtggagaccgccggctcataacgtccaggggcgagagagccagtggttcgcggcttgttttcacggccacgcttcgttttgcggctgcggtgactttattgggcatattaacagccttgctcctcgctttcctaacaaccaaggacccccgcatccacctgccttaaacaggccacctgcacagggcccagaaagccccgggggttccatactacccctgccagccctaccggcaccacctgatccgccaccacggcctggtggtggggaagacggtggcgacgccgcccgtggggccgctggcgccgccgaaggcgcgtatggagaagaagacctagaactgctgttcgccgccgccgaggaagacgatatgtcgcccaaagcgcccaaagctcgacacacgtcccgaaggactaccagaggagcaaagaggagcttacaatttactccaagccctcgaagactcagcccagtcggaagaaagcgaccaagaagaaatgcctcccctcgaagaagaacaagtactccacgagcaaaagaaagaggcgctcctccagcagctccagcagcagaaacaccaccagcgagtcctcaagcgaggcctcagactcctcctcggagacgtcctgaaactccgccggggtctacacatagacccggtccttacatagcaccccctccatacatccctgaccttctttttcccaacacccaaaaaaaaaaaaaattttccaacttcgattgggctacagaataccagcttgctaccgctttcgaccgccctctccgccactaccccttagacctcccgcactacccgtggctaccaaaaaagcccaatacccactctacctatagagtgtcctttcaactaaaagccccccaataa

SEQ ID NO: 681 - DNA, 882 bp, Torque teno virus
atgccgtggagaccgccggtgcatagtgtccaggggcgagaggatcagtggttcgcgagcttttttcacggccacgcttcattttgcggttgcggtgacgctgttggccatcttaatagcattgctcctcgctttcctcgcgccggtccaccaaggccccctccggggctagagcagcctaaccccccgcagcagggcccggccgggcccggagggccgcccgccatcttggcgctgccggctccgcccgcggagcctgacgacccgcagccacggcgtggtggtggggacggtggcgccgccgctggcgccgcaggcgaccgtggagaccgagactacgacgaagaagagctagacgagcttttccgcgccgccgccgaagacgatttgtctcccatcaaagcgaaacaagctcgactcggccttcagaggagaaaacccagagcaaaaagaatgctattctctcctcaaagcactcgaggaagaagagaccccagaagaagaagaaccagcaccccaagaaaaagcccagaaagaggagctactccaccagctccagctccagagacgccaccagcgagtcctcagacgagggctcaagctcgtctttacagacatcctccgactccgccagggagtccactggaaccccgagctcacatagagcccccaccttacataccagacctactttttcccaatactggtaaaaaaaaaaaattctctcccttcgactgggaaacggaggcccagctagcagggatattcaagcgtcctatgcgcttctatccctcagacacccctcactacccgtggttaccccccaagcgcgatatcccgaaaatatgtaacataaacttcaaaataaagctgcaagagtga

SEQ ID NO: 682 - DNA, 840 bp, Torque teno virus
atgccgtggtctctgccgagacataatatcagaacgagagaagatctctgggtgcaatcgattctttattcacatgacactttttgtggctgtgataatattcctgagcatcttactggcctcctgggcggcgtacgaccagctccacctagaaacccaggaccccctaccatacggagcctgccggcactgccgccagctccggaaccccctgaggaaccacggcgtggtggagatacagacggagaccgtggagaagatggaggagacgccgctggggcctacgaacccgaagacctagaagaacttttcgccgccgccgagcaagacgatatgcgtcgtgtccaaaaaaccccgattcgacactccccaccacgggcagctatcaaaccaagaagaagacgccttgtctatcctcagacaaccccaaaaagagcaagaagagaccacctccgaggaagaacaagcactccaaaaagaagaggagcaaaaagaaaagctcctacagcaactcagagtccagcgacagcaccagcgagtcctcagacagggaatcaaacacctcatgggagacgtcctccgactcagacagggagtccactggaacccagtcctataatacttccaccagaaccaataccagacctcttattccccaatactggtaaaaaaaaaaaattctctctcttcgactgggagtgcgagagggatctagcatgtgcattctgccgtcccatgcgcttctatccctcagacaacccaacttacccgtggttaccccccaagcgagatatccccaaaatatgtaaagtaaacttcaaaataaatttcactgaatga

SEQ ID NO: 683 - DNA, 849 bp, Torque teno virus
atgtcgtggagaccgccgagccaaaatttactgcaaagagaagaggcctggtactcagcttttcttagctcgcattctacattttgcggttgtactgaccctctgctgcatattactctcattgctggccgccttactaaccccgtacccgtcacccgccaaccggagacccctcctaacggcctcagggggctgccggcactgccagcaccccctgaaccaccagcaccgccaccacggcctggggatggtaccggagaagaagatggcgcccatggagaaggagaaggtgggcgatacgcagaagaagacctagaagaactgttcgccgccgcggcagaagacgatatgcgtcgcatccaaaagaccccgattcgacactccagtccaagggcagctcgaaagccaagaagaagaaagctatcgtttactcagagcactccaaaaagagcaagagacaagcagctcggaagaggagcagccacaaaaccaagagatccaagaaaaactactcctccagctccagcagcagcgacaacagcagcgactcctcgcaaagggaatcaagcacctcctcggagatgtcctccgactccgaaaaggagtccactgggacccggtccttacatagcacctccagaacctatcccagaccttttgttccccagtactaaaaaaaaaaagaaattttcaaaattagactgggagaacgaggctcaaatagcagggtggttagacaggcctatgaggctgtatcctggggacccccccttctacccttggctaccccgaaagccacctacccagcctacatgtagggtaagcttcaaaataaagctagatgattaa

SEQ ID NO: 684 - DNA, 804 bp, Torque teno virus
atgtcgtgggctccgccgctattcaactcgaaacagagagaggaccagtggtaccagtcaattattttcagccataatactttttgcggctgcggtgaccttgttaggcatttttgcgtcgttgcttctcgctttactgagcctcctgtagtgccggccctaccggcaccggtaccggcaccgccacggcgtggtacagaagaagaaggtggagaccgtggagaagacgccgcagaccgtggaccctacgcagaagaagagctagaagatttgttcgccgccgcccgagaagacgatatgcgtcgtcttcaaaagaccccgactggaaacccagtacaaaggaacccaagaaaccccagaagaagacgcctacactttactcaaagcactccaaaaagagcaagagagcagcagctcggaagaagaactcccacaagaagagcaagagatccaaaaaacacaactcctcaagcagctccaactccagcagcagcaacagcgaatcctcaagaggggaatcagacacctcttcggagacgtcctccgactcagaaaaggagtccactccaacccagacctattataataccagcagaggaaatcccagacctgcttttccccaatactggtaaaaaaaaaaaattctctccattcgattgggagacagagcagcagctcgcatgctggatgcggcgccccatgcgcttctatccaacagaccccccgttctacccctggctaccccccaagcgagatatccccaatatatgtaaagtcaacttcaaaataaattactcagagtaa

SEQ ID NO: 685 - DNA, 846 bp, Torque teno virus
atgccgtggcatccaccgggctacaacgttcaacagagagaagagctctgggtacagacagttactacttcacatgctactttttgcggctgtggtgaccctagtagccatcttcaccgcattcttagccgccttaataacagcagccggcggccccccgaaaccccaaaccccattcgtgccctaccggccctaccggcaccccaagaacctgaacagccgccatcacggcctggtaccggtacagaagaaggccatggcgccgaaggaggcgaccgaggtggggcctacgcagaagaagatttagaagatcttttcgcggccgcggaagaagacgatatgcgtcgtgtcaaaaagaccccgattggaaacccagtaccacggccaacacgaaagccaagaagaagacgcctatcttttactcaaacaactccaggaagagcaagaaacgagcagttcggagggagaacaagcaccccaagaaaaaacactccaaaaagaaaagctcctcaagcagctgcagctccacaagcagcagcagcaactcctcagaaaaggaatcagacacctcctcggggacgtcctccgactcagacggggagtccactgggacccaggcctatagtactgcctccagagcctattccagacttgcttttcccaaatactaaaaaaaaaaagaaattttcgcccttagactgggagaacgaggctcaaatagcagggtggttagacaggcctatgaggctgtatcctggggacaaccccttctacccgtggctaccaaaaaagccacctacccaccctacatgtagagtaaccttcaaaataaagctagatgattaa

SEQ ID NO: 686 - DNA, 891 bp, Torque teno virus
atgtcgtggcgaccgccgttgcattctatccaaggcagagaagatcaatggtatgcaggcatctttcatacgcattttgctttttgcggttgtggtgaccctgttgggcgtattaaccgcattgctcaccgctttcctaacgccggtcccccgagaccacctccagggctagaccagcccaacctcggagggccggaaggtccaggaggtgcccctagagccctgccagccctgccggccccggcagagccagagccggcaccacggcgtggtggtggggccgatggagacagcgccgctggggccgccgccgccgcagaccatggagggtacgacgaaggagacctagaagatcttttcgccgccgccgccgaggacgatatggcctttatcaagaaaaagaaacaagctcgacacaaagatgccaggccccccaacccccgaaaaagaaagctacactttactccaagccctccaagagtcgggccaggagagcagctcccaggacgaagaacaagcaccccaaaaagaagagaaccagaaagaagcgctcgtggagcagctccagctccagaaacagcaccagcgagtcctcaagcgaggcctcaaactcctcttgggagacgtcctccgactccgccgcggagtccactgggaccccctcctatcctaattcagggtccctctatcccagacctgcttttccctaacactcaaaaaaaacccaaattttccaacttcgactgggccaccgagtaccaaatagccaagtggccagaccgccctttgaggcactacccctcagacctccctcactacccgtggctaccaaaaaagccacctacccagcctacatgtagagtaagtttcaaattaaagcttgatgcctaa

SEQ ID NO: 687 - DNA, 801 bp, Torque teno virus
atgagtatttggaggcctccactgcacaatgtcccgggactcgaacacctctggtacgagtcagtgcatcgtagccatgctgctgtttgtggctgtggggatcctgtacgccatcttactgctcttgctgaaagatatggcattccgggagggtcgcggtcttctggggcaccgggagtagggggcaaccacaaccctccccagatccgtcgagcccgccacccggcggctgctccggaccccccagcaggtaaccagcctccggccctgccatggcatggggatggtggaaacgaaagcggcgctggtggtggagaaagcggtggacccgtggccgacttcgcagacgatggcctagacgatctcgtcgccgccctcgacgaagaagaaagaagacttcaatatccaagagagacaacaaagagaacagagaccgtggacgagcgaaagcgagagcgaagcagaagcccaagaagagacgcaggcgggctcggtccgagagcagctccagcagcagctccaagagcagtttcaactccgaagagggctcaagtgcctcttcgagcagttagtcagaacccaacagggagtccacgtagatccctgcctcgtgtaggcccggagcagtggctactccccgagagaaagcctaagcccgctcctacttcaggagactgggctatggagtacctaatgtgcaaaataatgaataggcctcctcgctctcagcttactgaccccccattttacccttactgcaaaaataattacaatgtaacctttcagcttaactacaaataa

SEQ ID NO: 688 - DNA, 801 bp, Torque teno virus
atgagcttctggagacctccggtgcacaatgccacggggatccagcgcctgtggtacgagtcctttcaccgtggccatgctgctttttgtggttgtggggatcctatacttcacattactgcacttgctgagacatatggccatccaacaggcccgagaccttctgggccaccgcgagtagaccccgatccccagatccgtagagccaggcctgccccggccgctccggagccctcacaggttgagccgagacctgccctgccatggcatggggatggtggaagcgacggcggcgctggtggttccggaagcggtggacccgtggcagacttcgcagacgatggcctcgatcagctcgtcgccgccctagacgacgaagaaaaaaggctcagattcactccaaagagaatcgagaccgtggagcaactcggagaccgaggcagagacagaagccccctcggaagaagagccggagaaccaagaagaacaagtactccagttgcagctccgacagcagctccgagaacagcgaaaactcagacagggaatccagtgcctcttcgagcaactgataacaacccaacagggggttcacaaaaacccattgctagagtaggcccagagcagtggctgtttcccgagagaaagccaaaaccacctcccaccgcccaggactgggcggaggagtacactgcctgtaaatactggggtaggccacctcgcaaattcctcacagacacgccattctatactcactgcaagaccaattacaatgtaacctttatgcttaactatcaataa

SEQ ID NO: 689 - DNA, 516 bp, Torque teno virus
atgggactggcgacgggggctttttggtgcagatgctatccagagagtgtcacaaaaaccggaagatgctctccgctttacaaaccctttcaagagacccagatatcttcccccgacagacggagaagactaccgacaagaagaagacttcgctttacaggaaagaagacggcgcacatccacagaagaagtccaggacgaggagagccccccgcaaaacgcgccgctcctacagcagcagcagcagcagcgggagctctcagtccagcacgcggagcagcagcgactcggagtccaactccgatacatcctccaagaagtcctcaaaacgcaagcgggtctccacctaaaccccctattattaggcccgccacaaacaaggtgtatatctttgagccccccagaggcctactccccatagtgggaaaagaagcctgggaggacgagtactgcacctgcaagtactgggatcgccctcccagaaccaaccacctagacacccccacttatccctag

SEQ ID NO: 690 - DNA, 22 bp, Artificial Sequence
  source: /note="Description of Artificial Sequence: Synthetic primer"
attcgaatggctgagtttatgc

SEQ ID NO: 691 - DNA, 24 bp, Artificial Sequence
  source: /note="Description of Artificial Sequence: Synthetic primer"
cacgaattagccaagactgggcac

SEQ ID NO: 692 - DNA, 20 bp, Artificial Sequence
  source: /note="Description of Artificial Sequence: Synthetic primer"
gctcccactcctgatttctg

SEQ ID NO: 693 - DNA, 21 bp, Artificial Sequence
  source: /note="Description of Artificial Sequence: Synthetic primer"
ccttgactacggtggtttcac

SEQ ID NO: 694 - DNA, 22 bp, Artificial Sequence
  source: /note="Description of Artificial Sequence: Synthetic primer"
tgcaggcattcgagggcttgtt

SEQ ID NO: 695 - DNA, 20 bp, Artificial Sequence
  source: /note="Description of Artificial Sequence: Synthetic primer"
tttaaccccctagtcccagg

SEQ ID NO: 696 - DNA, 56 bp, Artificial Sequence
  source: /note="Description of Artificial Sequence: Synthetic oligonucleotide"
tttgtgacacaagatggccgacttccttcctctttagtcttccccaaagaagacaa

SEQ ID NO: 697 - DNA, 20 bp, Artificial Sequence
  source: /note="Description of Artificial Sequence: Synthetic primer"
gaagcccaccaaaagcaatt

SEQ ID NO: 698 - DNA, 21 bp, Artificial Sequence
  source: /note="Description of Artificial Sequence: Synthetic primer"
agttcccgtgtctatagtcga

SEQ ID NO: 699 - DNA, 22 bp, Artificial Sequence
  source: /note="Description of Artificial Sequence: Synthetic probe"
acttcgttacagagtccagggg

SEQ ID NO: 700 - DNA, 20 bp, Artificial Sequence
  source: /note="Description of Artificial Sequence: Synthetic primer"
agcaacaggtaatggaggac

SEQ ID NO: 701 - DNA, 20 bp, Artificial Sequence
  source: /note="Description of Artificial Sequence: Synthetic primer"
tggaagctggggtctttaac

SEQ ID NO: 702 - DNA, 22 bp, Artificial Sequence
  source: /note="Description of Artificial Sequence: Synthetic probe"
tctaccttaggtgcaaagggcc

SEQ ID NO: 703 - DNA, 71 bp, Artificial Sequence
  source: /note="Description of Artificial Sequence: Synthetic oligonucleotide"
cgggtgccggaggtgagtttacacaccgcagtcaaggggcaattcgggctcgggactggccgggctwtggg

SEQ ID NO: 704 - DNA, 71 bp, Artificial Sequence
  source: /note="Description of Artificial Sequence: Synthetic oligonucleotide"
cgggtgccgtaggtgagtttacacaccgcagtcaaggggcaattcgggctcgggactggccgggctatggg

SEQ ID NO: 705 - DNA, 71 bp, Artificial Sequence
  source: /note="Description of Artificial Sequence: Synthetic oligonucleotide"
cgggtgccggaggtgagtttacacaccgcagtcaaggggcaattcgggctcgggactggccgggccctggg

SEQ ID NO: 706 - DNA, 71 bp, Artificial Sequence
  source: /note="Description of Artificial Sequence: Synthetic oligonucleotide"
cgggtgccggaggtgagtttacacaccgcagtcaaggggcaattcgggctcgggactggccgggctttggg

SEQ ID NO: 707 - DNA, 71 bp, Artificial Sequence
  source: /note="Description of Artificial Sequence: Synthetic oligonucleotide"
cgggtgccggaggtgagtttacacaccgcagtcaaggggcaattcgggctcgggactggccgggctatggg

SEQ ID NO: 708 - DNA, 71 bp, Artificial Sequence
  source: /note="Description of Artificial Sequence: Synthetic oligonucleotide"
cgggtgccggaggtgagtttacacaccgaagtcaaggggcaattcgggctcaggactggccgggctttggg

SEQ ID NO: 709 - DNA, 169 bp, Artificial Sequence
  source: /note="Description of Artificial Sequence: Synthetic polynucleotide"
  modified_base (20)..(20): a, c, t, g, unknown or other
  modified_base (22)..(22): a, c, t, g, unknown or other
  modified_base (40)..(42): a, c, t, g, unknown or other
  modified_base (53)..(56): a, c, t, g, unknown or other
  modified_base (62)..(62): a, c, t, g, unknown or other
  modified_base (64)..(64): a, c, t, g, unknown or other
  modified_base (97)..(98): a, c, t, g, unknown or other
gccgccgcggcggcggsggngnsgcgcgctdcgcgcgcsnnncrccrgggggnnnncwgcsncncccccccccgcgcatgcgcgggkcccccccccnncggggggctccgccccccggcccccccccgtgctaaacccaccgcgcatgcgcgaccacgcccccgccgcc

SEQ ID NO: 710 - DNA, 156 bp, Artificial Sequence
  source: /note="Description of Artificial Sequence: Synthetic polynucleotide"
gcggcgggggggcggccgcgttcgcgcgccgcccaccagggggtgctgcgcgcccccccccgcgcatgcgcggggcccccccccgggggggctccgcccccccggcccccccccgtgctaaacccaccgcgcatgcgcgaccacgcccccgccgcc

SEQ ID NO: 711 - DNA, 115 bp, Artificial Sequence
  source: /note="Description of Artificial Sequence: Synthetic polynucleotide"
cggcggcggcggcgcgcgcgctgcgcgcgcgcgccgggggggcgccagcgcccccccccccgcgcatgcacgggtccccccccccacggggggctccgccccccggccccccccc

SEQ ID NO: 712 - DNA, 121 bp, Artificial Sequence
  source: /note="Description of Artificial Sequence: Synthetic polynucleotide"
ccgtcggcgggggggccgcgcgctgcgcgcgcggcccccgggggaggcacagcctcccccccccgcgcgcatgcgcgcgggtccccccccctccggggggctccgccccccggcccccccc

SEQ ID NO: 713 - DNA, 104 bp, Artificial Sequence
  source: /note="Description of Artificial Sequence: Synthetic polynucleotide"
cggcggcggcgcgcgcgctacgcgcgcgcgccggggggctgccgccccccccccgcgcatgcgcggggcccccccccgcggggggctccgccccccggcccccc

SEQ ID NO: 714 - DNA, 122 bp, Artificial Sequence
  source: /note="Description of Artificial Sequence: Synthetic polynucleotide"
gccgccgcggcggcggggggcggcgcgctgcgcgcgccgcccagtagggggagccatgcgcccccccccgcgcatgcgcggggcccccccccgcggggggctccgccccccggccccccccg

SEQ ID NO: 715 - DNA, 71 bp, Artificial Sequence
  source: /note="Description of Artificial Sequence: Synthetic oligonucleotide"
cgggtgccgkaggtgagtttacacaccgmagtcaaggggcaattcgggctcrggactggccgggcyhtggg

SEQ ID NO: 716 - DNA, 79 bp, Artificial Sequence
  source: /note="Description of Artificial Sequence: Synthetic oligonucleotide"
  modified_base (20)..(20): a, c, t, g, unknown or other
  modified_base (22)..(22): a, c, t, g, unknown or other
  modified_base (40)..(42): a, c, t, g, unknown or other
  modified_base (53)..(56): a, c, t, g, unknown or other
  modified_base (62)..(62): a, c, t, g, unknown or other
  modified_base (64)..(64): a, c, t, g, unknown or other
gccgccgcggcggcggsggngnsgcgcgctdcgcgcgcsnnncrccrgggggnnnncwgcsncncccccccccgcgcat

SEQ ID NO: 717 - DNA, 31 bp, Artificial Sequence
  source: /note="Description of Artificial Sequence: Synthetic oligonucleotide"
  modified_base (18)..(19): a, c, t, g, unknown or other
gcgcgggkcccccccccnncggggggctccg

SEQ ID NO: 718 - DNA, 59 bp, Artificial Sequence
  source: /note="Description of Artificial Sequence: Synthetic oligonucleotide"
ccccccggcccccccccgtgctaaacccaccgcgcatgcgcgaccacgcccccgccgcc

SEQ ID NO: 719 - DNA, 7 bp, Artificial Sequence
  source: /note="Description of Artificial Sequence: Synthetic oligonucleotide"
gcggcgg

SEQ ID NO: 720 - DNA, 7 bp, Artificial Sequence
  source: /note="Description of Artificial Sequence: Synthetic oligonucleotide"
gggggcg

SEQ ID NO: 721 - DNA, 6 bp, Artificial Sequence
  source: /note="Description of Artificial Sequence: Synthetic oligonucleotide"
gccgcg

SEQ ID NO: 722 - DNA, 25 bp, Artificial Sequence
  source: /note="Description of Artificial Sequence: Synthetic oligonucleotide"
ttcgcgcgccgcccaccagggggtg

SEQ ID NO: 723 - DNA, 5 bp, Artificial Sequence
  source: /note="Description of Artificial Sequence: Synthetic oligonucleotide"
ctgcg

SEQ ID NO: 724 - DNA, 17 bp, Artificial Sequence
  source: /note="Description of Artificial Sequence: Synthetic oligonucleotide"
cgcccccccccgcgcat

SEQ ID NO: 725 - DNA, 17 bp, Artificial Sequence
  source: /note="Description of Artificial Sequence: Synthetic oligonucleotide"
gcgcggggccccccccc

SEQ ID NO: 726 - DNA, 72 bp, Artificial Sequence
  source: /note="Description of Artificial Sequence: Synthetic oligonucleotide"
gggggggctccgcccccccggcccccccccgtgctaaacccaccgcgcatgcgcgaccacgcccccgccgcc

SEQ ID NO: 727 - DNA, 14 bp, Artificial Sequence
  source: /note="Description of Artificial Sequence: Synthetic oligonucleotide"
cggcggcggcggcg

SEQ ID NO: 728 - DNA, 17 bp, Artificial Sequence
  source: /note="Description of Artificial Sequence: Synthetic oligonucleotide"
cgcgcgctgcgcgcgcg

SEQ ID NO: 729 - DNA, 19 bp, Artificial Sequence
  source: /note="Description of Artificial Sequence: Synthetic oligonucleotide"
cgccgggggggcgccagcg

SEQ ID NO: 730 - DNA, 17 bp, Artificial Sequence
  source: /note="Description of Artificial Sequence: Synthetic oligonucleotide"
cccccccccccgcgcat

SEQ ID NO: 731 - DNA, 31 bp, Artificial Sequence
  source: /note="Description of Artificial Sequence: Synthetic oligonucleotide"
gcacgggtccccccccccacggggggctccg

SEQ ID NO: 732 - DNA, 17 bp, Artificial Sequence
  source: /note="Description of Artificial Sequence: Synthetic oligonucleotide"
ccccccggccccccccc

SEQ ID NO: 733 - DNA, 37 bp, Artificial Sequence
  source: /note="Description of Artificial Sequence: Synthetic oligonucleotide"
ccgtcggcgggggggccgcgcgctgcgcgcgcggccc

SEQ ID NO: 734 - DNA, 84 bp, Artificial Sequence
  source: /note="Description of Artificial Sequence: Synthetic oligonucleotide"
ccgggggaggcacagcctcccccccccgcgcgcatgcgcgcgggtccccccccctccggggggctccgccccccggcccccccc

SEQ ID NO: 735 - DNA, 11 bp, Artificial Sequence
  source: /note="Description of Artificial Sequence: Synthetic oligonucleotide"
cggcggcggcg

SEQ ID NO: 736 - DNA, 17 bp, Artificial Sequence
  source: /note="Description of Artificial Sequence: Synthetic oligonucleotide"
cgcgcgctacgcgcgcg

SEQ ID NO: 737 - DNA, 10 bp, Artificial Sequence
  source: /note="Description of Artificial Sequence: Synthetic oligonucleotide"
cgccgggggg

SEQ ID NO: 738 - DNA, 7 bp, Artificial Sequence
  source: /note="Description of Artificial Sequence: Synthetic oligonucleotide"
ctgccgc

SEQ ID NO: 739 - DNA, 15 bp, Artificial Sequence
  source: /note="Description of Artificial Sequence: Synthetic oligonucleotide"
cccccccccgcgcat

SEQ ID NO: 740 - DNA, 17 bp, Artificial Sequence
  source: /note="Description of Artificial Sequence: Synthetic oligonucleotide"
gcgcggggccccccccc

SEQ ID NO: 741 - DNA, 13 bp, Artificial Sequence
  source: /note="Description of Artificial Sequence: Synthetic oligonucleotide"
gcggggggctccg

SEQ ID NO: 742 - DNA, 14 bp, Artificial Sequence
  source: /note="Description of Artificial Sequence: Synthetic oligonucleotide"
ccccccggcccccc

SEQ ID NO: 743 - DNA, 117 bp, Artificial Sequence
  source: /note="Description of Artificial Sequence: Synthetic polynucleotide"
  misc_feature (10)..(10): /note="May or may not be present"
  misc_feature (12)..(12): /note="May or may not be present"
  misc_feature (30)..(32): /note="May or may not be present"
  misc_feature (34)..(34): /note="May or may not be present"
  misc_feature (43)..(46): /note="May or may not be present"
  misc_feature (52)..(54): /note="May or may not be present"
  misc_feature (70)..(71): /note="May or may not be present"
  misc_feature (89)..(90): /note="May or may not be present"
  misc_feature (103)..(103): /note="May or may not be present"
cggcggsggsgcsscgcgctdcgcgcgcsgcccrsyrggggrdssmmwgcskcscccccccscgcgcatgcgcrcgggkcccccccccyvsggggggctccgcccccccggcccccc

SEQ ID NO: 744 - DNA, 19 bp, Artificial Sequence
  source: /note="Description of Artificial Sequence: Synthetic oligonucleotide"
gccgccgcggcggcggggg

SEQ ID NO: 745 - DNA, 41 bp, Artificial Sequence
  source: /note="Description of Artificial Sequence: Synthetic oligonucleotide"
gcggcgcgctgcgcgcgccgcccagtagggggagccatgcg

SEQ ID NO: 746 - DNA, 15 bp, Artificial Sequence
  source: /note="Description of Artificial Sequence: Synthetic oligonucleotide"
cccccccccgcgcat

SEQ ID NO: 747 - DNA, 17 bp, Artificial Sequence
  source: /note="Description of Artificial Sequence: Synthetic oligonucleotide"
gcgcggggccccccccc

SEQ ID NO: 748 - DNA, 13 bp, Artificial Sequence
  source: /note="Description of Artificial Sequence: Synthetic oligonucleotide"
gcggggggctccg

SEQ ID NO: 749 - DNA, 17 bp, Artificial Sequence
  source: /note="Description of Artificial Sequence: Synthetic oligonucleotide"
ccccccggccccccccg

What is claimed is:

1. A method of delivering an exogenous effector to a mammalian cell, comprising:
(a) providing a synthetic curon, and
(b) contacting a mammalian cell with the synthetic curon, wherein the synthetic curon comprises:
(i) a genetic element comprising a promoter element and a nucleic acid sequence encoding an exogenous effector, wherein the genetic element comprises a sequence having at least 95% sequence identity to the Anellovirus 5′ UTR nucleotide sequence of:
CGGGTGCCGX₁AGGTGAGTTTACACACCGX₂AGTCAAGGGGCAATTCGGG
CTCX₃GGACTGGCCGGGCX₄X₅TGGG,
wherein:
X₁=G or T,
X₂=C or A,
X₃=G or A,
X₄=T or C, and
X₅=A, C, or T (SEQ ID NO: 715); and
(ii) a proteinaceous exterior comprising a polypeptide having at least 95% sequence identity to an Anellovirus ORF1 protein; wherein the genetic element is enclosed within the proteinaceous exterior; and
wherein the synthetic curon is capable of delivering the genetic element into the mammalian cell;
thereby delivering the exogenous effector to the mammalian cell.

2. The method of claim 1, wherein the genetic element comprises a sequence having at least 95% sequence identity to the Anellovirus 5′ UTR nucleotide sequence of
(SEQ ID NO: 708)
CGGGTGCCGGAGGTGAGTTTACACACCGAAGTCAAGGGGCAATTCGGGCT
CAGGACTGGCCGGGCTTTGGG.

3. The method of claim 1, wherein the genetic element comprises a sequence having at least 95% sequence identity to nucleotides 323-393 of SEQ ID NO: 41.

4. The method of claim 1, wherein the genetic element comprises a sequence of at least 100 nucleotides in length, which consists of G or C at least 80% of the positions.

5. The method of claim 1, wherein the genetic element further comprises a sequence having the Anellovirus GC-rich region nucleotide sequence of:
CGGCGGX₁GGX₂GX₃X₄X₅CGCGCTX₆CGCGCGCX₇X₈X₉X₁₀CX₁₁X₁₂
X₁₃X₁₄GGGGX₁₅X₁₆X₁₇X₁₈X₁₉X₂₀X₂₁GCX₂₂X₂₃X₂₄X₂₅CCCCC
CCX₂₆CGCGCATX₂₇X₂₈GCX₂₉CGGGX₃₀CCCCCCCCCX₃₁X₃₂X₃₃GG
GGGGCTCCGX₃₄CCCCCCGGCCCCCC,
wherein:
X₁=G or C
X₂=G, C, or absent
X₃=C or absent
X₄=G or C
X₅=G or C
X₆=T, G, or A
X₇=G or C
X₈=G or absent
X₉=C or absent
X₁₀=C or absent
X₁₁=G, A, or absent
X₁₂=G or C
X₁₃=C or T
X₁₄=G or A
X₁₅=G or A
X₁₆=A, G, T, or absent
X₁₇=G, C, or absent
X₁₈=G, C, or absent
X₁₉=C, A, or absent
X₂₀=C or A
X₂₁=T or A
X₂₂=G or C
X₂₃=G, T, or absent
X₂₄=C or absent
X₂₅=G, C, or absent
X₂₆=G or C
X₂₇=G or absent
X₂₈=C or absent
X₂₉=G Or A
X₃₀=G or T
X₃₁=C, T, or absent
X₃₂=G, C, A, or absent
X₃₃=G or C
X₃₄=C or absent (SEQ ID NO: 743).

6. The method of claim 1, wherein the genetic element comprises a sequence having at least 95% sequence identity to SEQ ID NO: 714.

7. The method of claim 1, wherein the genetic element comprises a sequence having at least 90% or 95% sequence identity to the Anellovirus GC-rich region nucleotide sequence of SEQ ID NO: 715.

8. The method of claim 1, wherein the genetic element comprises a sequence having at least 95% sequence identity to SEQ ID NO: 708 or to nucleotides 323-393 of SEQ ID NO: 41.

9. The method of claim 1, wherein the genetic element is circular, single stranded DNA.

10. The method of claim 1, wherein the genetic element integrates at a frequency of less than 1% of the curons that enters the mammalian cell.

11. The method of claim 1, wherein the proteinaceous exterior comprises a polypeptide having at least 95% sequence identity to an Anellovirus ORF1 amino acid sequence as shown in any of Tables 2, 4, 6, 8, 10, 12, 14, or 16.

12. The method of claim 1, wherein the proteinaceous exterior comprises a polypeptide comprising an amino acid sequence having at least 95% sequence identity to SEQ ID NO: 22 or SEQ ID NO: 45.

13. The method of claim 1, wherein the promoter element is exogenous or endogenous to wild-type Anellovirus.

14. The method of claim 1, wherein the exogenous effector encodes a therapeutic agent, optionally wherein the therapeutic agent is a therapeutic peptide or polypeptide or a therapeutic nucleic acid.

15. The method of claim 1, wherein the exogenous effector comprises an miRNA and decreases expression of a host gene.

16. The method of claim 1, wherein a population of at least 1000 of the synthetic curons delivers at least 100 copies of the genetic element into one or more of the mammalian cells.

17. The method of claim 1, wherein the synthetic curon directs the expression of the exogenous effector in the mammalian cell.

18. The method of claim 1, wherein the synthetic curon comprises one or more polypeptides comprising one or more of an amino acid sequence chosen from ORF2, ORF2/2, ORF2/3, ORF1, ORF1/1, or ORF1/2 of Table 12, or an amino acid sequence having at least 95% sequence identity thereto.

19. The method of claim 1, wherein the genetic element comprises a nucleic acid sequence encoding an amino acid sequence chosen from ORF1, ORF2, ORF2/2, ORF2/3, ORF1, ORF1/1, or ORF1/2 of Table 12, or an amino acid sequence having at least 95% sequence identity thereto.

20. The method of claim 1, wherein the contacting of (b) occurs in vitro.
